(19) United States
(12) Patent Application Publication
(10) Pub. No.: US 2009/0208977 A1
(43) Pub. Date: Aug. 20, 2009

(54) MATERIALS AND METHODS FOR SPERM SEX SELECTION

(75) Inventors: Keith HUDSON, Titirangi (NZ); Susan RAVELICH, Devenport (NZ)

Correspondence Address: SPECKMAN LAW GROUP PLLC, 1201 THIRD AVENUE, SUITE 330, SEATTLE, WA, 98101, US

(73) Assignee: ANDROGENIX LTD., Auckland City (NZ)

(21) Appl. No.: 12/178,531

(22) Filed: Jul. 23, 2008

Related U.S. Application Data
(60) Provisional application No. 60/951,363, filed on Jul. 23, 2007.
(60) Provisional application No. 61/029,835, filed on Feb. 19, 2008.

(51) Int. Cl. G01N 33/567; C12N 5/08

(52) U.S. Cl. 435/7.21; 435/366

(57) ABSTRACT

Materials and Methods for the separation of X- and Y-chromosome bearing sperm, for example in a semen sample, are provided. The methods involve contacting the semen sample with a binding agent, such as an antibody, that specifically binds to an antigen that is specific for an X- or Y-chromosome. Kits for use in the methods are also provided.

### REFERENCE TO RELATED APPLICATIONS

[0001] This application claims priority to U.S. Provisional Patent Application Nos. 61/029,835 filed Feb. 19, 2008, and 60/951,363 filed Jul. 23, 2007.

### FIELD OF THE INVENTION

[0002] This application relates to methods for identifying semen bearing the X or Y chromosome. More particularly, this application relates to sex-specific antigens and their use in such methods.

### BACKGROUND

[0003] The ability to identify and select male and female sperm has great value in the livestock industries, where there is an established market in artificial insemination of over US$ two billion per annum in the Organization for Economic Cooperation and Development (OECD). This is particularly true in the dairy industry where the majority of dairy farmers in key OECD markets impregnate their cows through artificial insemination. Sexed semen provides the opportunity to increase farmer productivity and income. For example, the availability of sexed semen would have significant impact in reducing and/or eliminating the minimal returns of male dairy calves as compared to female calves.

[0004] Genetic improvement, which has contributed significantly to increased milk yield per cow, is currently achieved by selecting the best sires and using artificial insemination (AI) to impregnate the herd. However, because the best cows can have either male or female progeny, the rate of genetic improvement is limited. The availability of sexed semen would allow selection of the best bulls and best cows from within a herd for herd replacement, thereby increasing the rate of genetic improvement. Utilizing sexed semen would also provide the opportunity to extend the average lactation length of high producing diary cows to 20-24 months, as replacements for these cows could be provided by less than two calves in a lifetime.

[0005] In the swine industry, semen sexing would remove the need for castration, improve feed efficiency and increase the lean meat content of the animals by reducing the number of males produced.

[0006] Currently the only available method to sort semen for sperm bearing the X or Y chromosome is to use a flow cytometer as described, for example, in U.S. Pat. Nos. 5,135,759, 5,985,216, 6,149,867 and 6,263,745. This approach exploits the small size difference in sperm size due to differences in DNA content to produce highly enriched populations of sperm with the X or Y chromosome (Johnson, Anim. Reprod. Sci. 60-61:93-107 (2000); Johnson et al., Biol. Reprod. 41:199-203 (1989)). However, this technique is limited by the use of the flow cytometer, and is too expensive and not easily scalable for use in routine sex selection in the livestock industry. Sexing semen by use of sperm surface molecules potentially provides a low cost, efficient and scaleable way to achieve this goal.

[0007] Previously used methods to detect surface differences on X & Y bearing sperm have been analytical, comprising a number of strategies, such as chromatography and immunological methods (Blecher et al., Theriogenology 52:1309-1321 (1999); Hendriksen et al., Mol. Reprod. Dev. 35:189-196 (1993); Howes et al., J. Reprod. Fertil. 110:195-204 (1997)). For example, U.S. Pat. No. 5,021,244 to Spaulding describes the use of flow cytometry followed by polyacrylamide gel electrophoresis (PAGE) to isolate sex-associated membrane proteins together with the use of such proteins to generate antibodies that can be employed to provide semen samples enriched in X or Y sperm. However, subsequent studies employing the methodology taught by Spaulding failed to identify any sex-specific spermatozoa, indicating that Spaulding's approach is unlikely to be successful (Howes et al., Jnl. Reproduction Fertility 110:195-204 (1997); Hendriksen et al., Mol. Reproduction Develop. 45:342-350 (1996)). US published patent application no. 2003/0162238 to Blecher et al. describes the isolation of a sex-chromosome-specific protein characterized as being X chromosome specific, associated with the cell membrane of bovine sperm cells and having a molecular weight of about 32 kDa.

[0008] The sensitivity of analytical techniques has recently improved with the introduction of two-dimensional-PAGE or multi-dimensional-chromatographic separation followed by mass spectrometry analysis (Domon and Aebersold, Science 312:212-217 (2006)). However, the analytical route still suffers from two major problems: first, that the most difficult group of proteins to analyze using this system are membrane components such as integral proteins, due to solubility issues; and second, that detection by mass spectrometry is limited in dynamic range. This limited dynamic range translates into a reduced sensitivity for detecting low abundance molecules if other high abundance species are present.

[0009] The methods described to date have been unsuccessful in discovering antigens specific for either X or Y bearing sperm, suggesting that either no differences exist and/or that the differences are small in nature and/or abundance. There thus remains a need in the art for materials and methods that may be effectively employed to identify and separate sperm bearing the X or Y chromosome.

### SUMMARY OF THE INVENTION

[0010] The present invention provides efficient, cost-effective and non-invasive methods for the identification and separation of X or Y-chromosome bearing sperm, together with compositions and kits for use in such methods. The disclosed methods have both high specificity (i.e. give few false positives) and high sensitivity (i.e. give few false negatives). The compositions disclosed herein comprise binding agents that specifically bind to antigens that are specific to either X- or Y-chromosome bearing sperm (referred to herein as X- or Y-chromosome specific antigens). The disclosed methods may be used in artificial insemination, for example, to increase the probability that offspring will be of the desired sex and/or to increase the probability that the offspring will carry a gene responsible for a desired trait.

[0011] In one aspect, methods for separating X- or Y-chromosome bearing sperm from semen are provided, together with sperm prepared by such methods. The disclosed methods comprise: (a) contacting the semen with at least one binding agent specific for an X- or Y-chromosome specific antigen for a period of time sufficient to form a conjugate between the binding agent and the X- or Y-chromosome bearing sperm; and (b) separating the conjugate from sperm which have not bound to the binding agent. The binding agent may be provided on a solid surface. In one embodiment, the binding agent is provided on the surface of a magnetic bead, such as a paramagnetic microsphere, and the binding agent-sperm conjugate is separated from non-bound sperm by applying an external magnetic field. In certain embodiments, the binding agents employed in such methods are specific for an antigen having an amino acid sequence selected from the group consisting of SEQ ID NO: 1-21, 43-89, 138, 140, 142, 144, 146, 148, 150, 152, 154, 156, 158, 160, 162, 164 and 183-201; sequences having at least 85%, 90%, 95%, 96%, 97%, 98% or 99% to a sequence of SEQ ID NO: 1-21, 43-89, 138, 140, 142, 144, 146, 148, 150, 152, 154, 156, 158, 160, 162, 164 and 183-201; and sequences encoded by a polynucleotide that hybridizes to a sequence of SEQ ID NO: 22-42, 90-136, 137, 139, 141, 143, 145, 147, 149, 151, 153, 155, 157, 159, 161, 163, 165-182 or 202 under stringent hybridization conditions.

[0012] In certain embodiments, the at least one binding agent employed in such methods is an antibody (such as a monoclonal antibody), or an antigen-binding fragment thereof, such as a Fab or scFv. Examples of binding agents that may be effectively employed in the disclosed methods include, but are not limited to, those provided in Table 1 below.

[0013] In another aspect, compositions comprising binding agents that are specific for an X- or Y-chromosome specific antigen are provided. In one embodiment, the binding agents are specific for an antigen having an amino acid sequence selected from the group consisting of SEQ ID NO: 1-21, 43-89, 138, 140, 142, 144, 146, 148, 150, 152, 154, 156, 158, 160, 162, 164 and 183-201, and variants thereof. Such binding agents may be labelled with a detection reagent and/or, as discussed above, attached to a magnetic bead in order to facilitate detection and/or separation of the X- or Y-chromosome bearing sperm in a biological sample, such as semen.

[0014] In a further aspect, kits for use in the disclosed methods are provided, such kits comprising a container holding at least one binding agent specific for an X- or Y-chromosome specific antigen disclosed herein. In certain embodiments, such kits comprise magnetic beads, such as paramagnetic microspheres, coated with, and/or attached to, one or more of the binding agents.

[0015] In yet another aspect, methods for identifying genes and/or proteins that are specific to X- or Y-chromosome bearing sperm are provided, such methods including a combination of bioinformatic and direct analytical steps as outlined in detail in the examples below. These methods may also be employed to identify surface differences between other closely related cells including, but not limited to, normal and cancer cells.

[0016] In a related aspect, methods for enriching a semen sample for either X- or Y-chromosome bearing sperm are provided, such methods comprising contacting a native semen sample with at least one binding agent disclosed herein, wherein binding of the X- or Y-chromosome bearing sperm to the binding agent is effective in reducing the mobility and/or activity of the sperm. In one embodiment, the disclosed binding agents may be conjugated to a cytotoxin using known methods, and used to destroy either X- or Y-chromosome bearing sperm. Such methods can be performed either in vitro in a semen sample, or in vivo by simultaneously or sequentially introducing a sperm sample and the binding agent into the vagina of a female animal. In certain embodiments, binding agents for use in such methods specifically bind to an antigen having an amino acid sequence selected from the group consisting of SEQ ID NO: 1-21, 43-89, 138, 140, 142, 144, 146, 148, 150, 152, 154, 156, 158, 160, 162, 164 and 183-201, sequences having at least 85%, 90%, 95%, 96%, 97%, 98% or 99% to a sequence of SEQ ID NO: 1-21, 43-89, 138, 140, 142, 144, 146, 148, 150, 152, 154, 156, 158, 160, 162, 164 and 183-201; and sequences encoded by polynucleotides that hybridize to a sequence of SEQ ID NO: 22-42, 90-136, 137, 139, 141, 143, 145, 147, 149, 151, 153, 155, 157, 159, 161, 163, 165-182 or 202 under stringent hybridization conditions.

[0017] These and additional features of the present invention and the manner of obtaining them will become apparent, and the invention will be best understood, by reference to the following more detailed description and the accompanying drawings.

### BRIEF DESCRIPTION OF THE FIGURES

[0018] FIG. 1 shows a comparison of RNA expression levels for known sperm proteins and orthologues of candidate X- or Y-chromosome specific genes disclosed herein.

[0019] FIG. 2 is a matrix of sperm treatment and binding assays employed in the present studies.

[0020] FIG. 3 is an outline of the SISCAPA technique used in the present studies.

[0021] FIG. 4 is an outline of the iTRAQ™ technique used in the present studies.

### DETAILED DESCRIPTION

[0022] The present disclosure provides antigens and variants thereof that are specific for either X- or Y-chromosome bearing sperm, together with binding agents that specifically bind to such antigens and/or variants thereof, and methods for the use of such binding agents in the detection and separation of X- and Y-chromosome bearing sperm. The amino acid sequences of disclosed bovine X- or Y-chromosome specific antigens are provided in SEQ ID NO: 1-21, 138, 140, 142, 144, 146, 148, 150, 152, 154, 156, 158, 160, 162 and 164, with the corresponding DNA sequences being provided in SEQ ID NO: 22-42, 137, 139, 141, 143, 145, 147, 149, 151, 153, 155, 157, 159, 161 and 163 respectively. The amino acid sequences of disclosed human X- or Y-chromosome specific antigens are provided in SEQ ID NO: 43-89, with the corresponding DNA sequences being provided in SEQ ID NO: 90-136, respectively. The amino acid sequences of equine X- or Y-chromosome specific antigens disclosed herein are provided in SEQ ID NO: 183-200, with the corresponding DNA sequences being provided in SEQ ID NO: 165-182, respectively.

[0023] A binding agent is herein defined as an agent that binds to an epitope of one of the disclosed X- or Y-chromosome specific antigens or a variant thereof, but does not bind detectably to unrelated polypeptides under similar conditions. Any agent that satisfies these requirements may be a binding agent. For example, a binding agent may be a polypeptide (such as a ligand), a ribosome (with or without a peptide component), an RNA molecule, or a small molecule. The ability of a binding agent to specifically bind to a polypeptide can be determined, for example, in a ELISA assay using techniques well known in the art, and/or using an assay described below in the Examples section. In preferred embodiments, a binding agent is an antibody, a functional antigen-binding fragment thereof, a small chain antibody variable domain fragment (scFv), a Fab fragment, a heavy chain variable domain thereof (V_{H}), or a light chain variable domain thereof (V_{L}). Binding agents that may be employed in the disclosed methods include, but are not limited to, those identified in Table 1.

TABLE 1

| Antigen | | | |
|---|---|---|---|
| SEQ | | | Catalog |
| ID NO: | Supplier | Antibody Name | number |
| 1 | SCBT* | PMCA3 (N-18) | SC-22074 |
| 1 | SCBT* | PMCA3 (C-15) | SC-22076 |
| 2 | SCBT* | BRS-3 (N-14) | SC-33404 |
| 2 | SCBT* | BRS-3 (K-19) | SC-33405 |
| 4, 138 | Made in-house | Anti-FAM11A | N/A |
| 5 | Made in-house | Anti-VSIG1 | N/A |
| 6, 140 | US Biological | CT 1 polyclonal | C7911-10 |
| | (Swampscott, MA) | antibody | |
| 7, 142 | SCBT* | ATP7A (C-20) | sc-30858 |
| 7, 142 | SCBT* | ATP7A (N-15) | sc-30856 |
| 7, 142 | SCBT* | ATP7A (H-180) | sc-32900 |
| 8 | SCBT* | XK (C-17) | sc-50198 |
| 8 | SCBT* | XK (W-13) | sc-50201 |
| 8 | SCBT* | XK (Y-16) | sc-50202 |
| 8 | IBGRL** | CD 238 antibody | 9440 |
| 8 | IBGRL** | CD 238 antibody | 9441 |
| 8 | R&D Systems, | Anti-human Kell | AF1914 |
| | Minneapolis, MN, USA | antibody | |
| 9 | SCBT* | NCAM-L1 (5G3) | SC-33686 |
| 9 | SCBT* | NCAM-L1 (I-18) | SC-31034 |
| 9 | SCBT* | NCAM-L1 (N-14) | SC-31032 |
| 9 | SCBT* | NCAM-L1 (UJ127.11) | SC-53386 |
| 9 | SCBT* | NCAM-L1 (H-200) | SC-15326 |
| 9 | SCBT* | NCAM-L1 (C-20) | SC-1508 |
| 10 | SCBT* | CXCR-3 (49801.111) | SC-57076 |
| 10 | SCBT* | CXCR-3 (C-20) | SC-6226 |
| 10 | SCBT* | CXCR-3 (H-95) | SC-13951 |
| 10 | SCBT* | CXCR-3 (CN-15) | SC-9900 |
| 12, 148 | Everest Biotech Ltd., | Anti-ATP6IP2/Renin | EB06118 |
| | Oxford, UK | receptor Antibody | |
| 13 | Everest Biotech Ltd., | Goat Anti-PGRMC1/ | EB07207 |
| | Oxford, UK | MPR Antibody | |
| 15 | SCBT* | CKR-3 (5E8) | SC-32777 |
| 15 | SCBT* | CKR-3 (H-52) | SC-7897 |
| 15 | R&D Systems, | Anti-human CCR3 | MAB155 |
| | Minneapolis, MN, USA | antibody | |
| 16, 152 | Medical & Biological | CX3CR1 | D070-3 |
| | Laboratories Co. Ltd., | | |
| | Woburn, MA, USA | | |
| 16, 152 | SCBT* | CX3CR1 (H-70) | SC-30030 |
| 16, 152 | SCBT* | CX3CR1 (K-13) | SC-31561 |
| 16, 152 | SCBT* | CX3CR1 (T-20) | SC-20432 |
| 21, 158 | Proteintech Group Inc., | FMR1NB antibody | 11069-2-AP |
| | Chicago, IL, USA | | |
| 45 | Made in-house | Anti-EFBN1 | N/A |
| | | extracellular domain | |

*Santa Cruz Biotechnology Inc., Santa Cruz, CA USA.
**International Blood Group Reference Laboratory, Bristol, UK.

[0024] In alternative embodiments, the binding agent is a protein. For example, the proteins CCL11, CC124 and CCL26 may be employed as binding agents for the antigen of SEQ ID NO: 15; CX3CL1 and fractaline may be used as binding agents for the antigen of SEQ ID NO: 16; CxCL9, CxCL1O and CxCL11 may be used as binding agents for the antigen of SEQ ID NO: 10; and rennin may be used as a binding agent for the antigen of SEQ ID NO: 12.

[0025] An “antigen-binding site”, or “antigen-binding fragment” of an antibody refers to the part of the antibody that participates in antigen binding. The antigen binding site is formed by amino acid residues of the N-terminal variable (“V”) regions of the heavy (“H”) and light (“L”) chains. Three highly divergent stretches within the V regions of the heavy and light chains are referred to as “hypervariable regions” which are interposed between more conserved flanking stretches known as “framework regions,” or “FRs”. Thus the term “FR” refers to amino acid sequences which are naturally found between, and adjacent to, hypervariable regions in immunoglobulins. In an antibody molecule, the three hypervariable regions of a light chain and the three hypervariable regions of a heavy chain are disposed relative to each other in three dimensional space to form an antigen-binding surface. The antigen-binding surface is complementary to the three-dimensional surface of a bound antigen, and the three hypervariable regions of each of the heavy and light chains are referred to as “complementarity-determining regions,” or “CDRs.”

[0026] Antibodies may be prepared by any of a variety of techniques known to those of ordinary skill in the art. See, e.g., Harlow and Lane, Antibodies: A Laboratory Manual, Cold Spring Harbor Laboratory, 1988. In general, antibodies can be produced by cell culture techniques, including the generation of monoclonal antibodies as described herein, or via transfection of antibody genes into suitable bacterial or mammalian cell hosts, in order to allow for the production of recombinant antibodies.

[0027] Monoclonal antibodies may be prepared using hybridoma methods, such as the technique of Kohler and Milstein, Eur. J. Immunol. 6:511-519, 1976, and improvements thereto. These methods involve the preparation of immortal cell lines capable of producing antibodies having the desired specificity. Monoclonal antibodies may also be made by recombinant DNA methods, such as those described in U.S. Pat. No. 4,816,567. DNA encoding the monoclonal antibodies disclosed herein may be isolated and sequenced using conventional procedures. Recombinant antibodies, antibody fragments, and fusions and polymers thereof, can be expressed in vitro or in prokaryotic cells (e.g. bacteria) or eukaryotic cells (e.g. yeast, insect or mammalian cells) and further purified as necessary using well known methods.

[0028] Antibodies may also be derived from a recombinant antibody library that is based on amino acid sequences that have been designed in silico and encoded by polynucleotides that are synthetically generated. Methods for designing and obtaining in silico-created sequences are known in the art (Knappik et al., J. Mol. Biol. 296:254:57-86, 2000; Krebs et al., J. Immunol. Methods 254:67-84, 2001; U.S. Pat. No. 6,300,064). A method for construction of human combinatorial libraries useful for yielding functional Fab fragments has been described by Rauchenberger et al. (J. Biol. Chem. 278:38194-38205, 2003).

[0029] Digestion of antibodies to produce antigen-binding fragments thereof can be performed using techniques well known in the art. For example, the proteolytic enzyme papain preferentially cleaves IgG molecules to yield several fragments, two of which (the “F(ab)” fragments) each comprise a covalent heterodimer that includes an intact antigen-binding site. The enzyme pepsin is able to cleave IgG molecules to provide several fragments, including the “F(ab′)₂” fragment, which comprises both antigen-binding sites. “Fv” fragments can be produced by preferential proteolytic cleavage of an IgM, IgG or IgA immunoglobulin molecule, but are more commonly derived using recombinant techniques known in the art. The Fv fragment includes a non-covalent V_{H}::V_{L} heterodimer including an antigen-binding site which retains much of the antigen recognition and binding capabilities of the native antibody molecule (Inbar et al., Proc. Natl. Acad. Sci. USA 69:2659-2662 (1972); Hochman et al., Biochem. 15:2706-2710 (1976); and Ehrlich et al., Biochem. 19:4091-4096 (1980)).

[0030] A wide variety of expression systems are available in the art for the production of antibody fragments, including Fab fragments, scFv, V_{L} and V_{H}s. For example, expression systems of both prokaryotic and eukaryotic origin may be used for the large-scale production of antibody fragments and antibody fusion proteins. Particularly advantageous are expression systems that permit the secretion of large amounts of antibody fragments into the culture medium. Eukaryotic expression systems for large-scale production of antibody fragments and antibody fusion proteins have been described that are based on mammalian cells, insect cells, plants, transgenic animals, and lower eukaryotes. For example, the cost-effective, large-scale production of antibody fragments can be achieved in yeast fermentation systems. Large-scale fermentation of these organisms is well known in the art and is currently used for bulk production of several recombinant proteins. Yeasts and filamentous fungi are accessible for genetic modifications and the protein of interest may be secreted into the culture medium. In addition, some of the products comply with the GRAS (Generally Regarded as Safe) status in that they do not harbor pyrogens, toxins, or viral inclusions.

[0031] Methylotrophic and other yeasts such as Candida boidinii, Hansenula polymorpha, Pichia methanolica, and Pichia pastoris are well known systems for the production of heterologous proteins. High levels of proteins, in milligram to gram quantities, can be obtained and scaling up to fermentation for industrial applications is possible.

[0032] The P. pastoris system is used in several industrial-scale production processes. For example, the use of Pichia for the expression of scFv fragments as well as recombinant antibodies and fragments thereof, has been described. Ridder et al., Biotechnology 13:255-260 (1995); Anadrade et al., J. Biochem. (Tokyo) 128:891-895 (2000); Pennell et al., Res. Immunol. 149:599-603 (1998). In shake-flask cultures, levels of 250 mg/L to over 1 g/L of scFv or V_{HH} can be achieved (Eldin et al., J. Immunol. Methods 201:67-75 (1997); Freyre et al., J. Biotechnol. 76:157-163 (2000)).

[0033] Similar expression systems for scFv have been described for Saccharomyces cerevisiae, Schizosaccharomyces pombe, Yarrowia lipolytica, and Kluyveromyces lactis. Horwitz et al., Proc. Natl. Acad. Sci. USA 85:8678-8682 (1988); Davis et al., Biotechnology 9:165-169 (1991); and Swennen et al., Microbiology 148:41-50 (2002). Filamentous fungi, such as Trichoderma and Aspergillus, have the capacity to secrete large amounts of proteins. This property may be exploited for the expression of scFv and V_{HH}s. Radzio et al., Process-biochem. 32:529-539 (1997); Punt et al., Trends Biotechnol. 20:200-206 (2002); Verdoes et al., Appl. Microbiol. Biotechnol. 43:195-205 (1995); Gouka et al., Appl. Microbiol. Biotechnol. 47:1-11 (1997); Ward et al., Biotechnology 8:435-440 (1990); Durand et al., Enzyme Microb. Technol. 6:341-346 (1988); Keranen et al., Curr. Opin. Biotechnol. 6:534-537 (1995); Nevalainen et al., J. Biotechnol. 37:193-200 (1994); Nyyssonen et al., Biotechnology 11:591-595 (1993); and Nyyssonen et al., International Patent Publication no. WO 92/01797.

[0034] In certain embodiments, the binding agents specifically bind to a variant of an X- or Y-chromosome specific antigen disclosed herein. As used herein, the term “variant” comprehends nucleotide or amino acid sequences different from the specifically identified sequences, wherein one or more nucleotides or amino acid residues is deleted, substituted, or added. Variants may be naturally occurring allelic variants, or non-naturally occurring variants. Variant sequences (polynucleotide or polypeptide) preferably exhibit at least 80%, 85%, 90%, 95%, 96%, 97%, 98% or 99% identity to a sequence disclosed herein. The percentage identity is determined by aligning the two sequences to be compared as described below, determining the number of identical residues in the aligned portion, dividing that number by the total number of residues in the inventive (queried) sequence, and multiplying the result by 100.

[0035] In addition to exhibiting the recited level of sequence identity, variants of the disclosed X- or Y-chromosome specific antigens are preferably themselves specific to either X- or Y-chromosome bearing sperm.

[0036] Variant sequences generally differ from the specifically identified sequence only by conservative substitutions, deletions or modifications. As used herein, a “conservative substitution” is one in which an amino acid is substituted for another amino acid that has similar properties, such that one skilled in the art of peptide chemistry would expect the secondary structure and hydropathic nature of the polypeptide to be substantially unchanged. In general, the following groups of amino acids represent conservative changes: (1) ala, pro, gly, glu, asp, gln, asn, ser, thr; (2) cys, ser, tyr, thr; (3) val, ile, leu, met, ala, phe; (4) lys, arg, his; and (5) phe, tyr, trp, his. Variants may also, or alternatively, contain other modifications, including the deletion or addition of amino acids that have minimal influence on the antigenic properties, secondary structure and hydropathic nature of the polypeptide. For example, a polypeptide may be conjugated to a signal (or leader) sequence at the N-terminal end of the protein which co-translationally or post-translationally directs transfer of the protein. The polypeptide may also be conjugated to a linker or other sequence for ease of synthesis, purification or identification of the polypeptide (e.g., poly-His), or to enhance binding of the polypeptide to a solid support. For example, a polypeptide may be conjugated to an immunoglobulin Fc region.

[0037] Polypeptide and polynucleotide sequences may be aligned, and percentages of identical nucleotides in a specified region may be determined against another polynucleotide, using computer algorithms that are publicly available. Two exemplary algorithms for aligning and identifying the identity of polynucleotide sequences are the BLASTN and FASTA algorithms. The alignment and identity of polypeptide sequences may be examined using the BLASTP and algorithm. BLASTX and FASTX algorithms compare nucleotide query sequences translated in all reading frames against polypeptide sequences. The FASTA and FASTX algorithms are described in Pearson and Lipman, Proc. Natl. Acad. Sci. USA 85:2444-2448, 1988; and in Pearson, Methods in Enzymol. 183:63-98, 1990. The FASTA software package is available from the University of Virginia, Charlottesville, Va. 22906-9025. The FASTA algorithm, set to the default parameters described in the documentation and distributed with the algorithm, may be used in the determination of polynucleotide variants. The readme files for FASTA and FASTX Version 2.0x that are distributed with the algorithms describe the use of the algorithms and describe the default parameters.

[0038] The BLASTN software is available on the NCBI anonymous FTP server and is available from the National Center for Biotechnology Information (NCBI), National Library of Medicine, Building 38A, Room 8N805, Bethesda, Md. 20894. The BLASTN algorithm Version 2.0.6 [Sep. 10, 1998] and Version 2.0.11 [Jan. 20, 2000] set to the default parameters described in the documentation and distributed with the algorithm, is preferred for use in the determination of variants according to the present invention. The use of the BLAST family of algorithms, including BLASTN, is described at NCBI's website and in the publication of Altschul, et al., “Gapped BLAST and PSI-BLAST: a new generation of protein database search programs,” Nucleic Acids Res. 25:3389-3402, 1997.

[0039] The “hits” to one or more database sequences by a queried sequence produced by BLASTN, BLASTP, FASTA, or a similar algorithm, align and identify similar portions of sequences. The hits are arranged in order of the degree of similarity and the length of sequence overlap. Hits to a database sequence generally represent an overlap over only a fraction of the sequence length of the queried sequence.

[0040] The percentage identity of a polynucleotide or polypeptide sequence is determined by aligning polynucleotide and polypeptide sequences using appropriate algorithms, such as BLASTN or BLASTP, respectively, set to default parameters; identifying the number of identical nucleic or amino acids over the aligned portions; dividing the number of identical nucleic or amino acids by the total number of nucleic or amino acids of the polynucleotide or polypeptide of the present invention; and then multiplying by 100 to determine the percentage identity.

[0041] In an alternative embodiment, variant polypeptides are encoded by polynucleotide sequences that hybridize to a disclosed polynucleotide under stringent conditions. Stringent hybridization conditions for determining complementarity include salt conditions of less than about 1 M, more usually less than about 500 mM, and preferably less than about 200 mM. Hybridization temperatures can be as low as 5° C., but are generally greater than about 22° C., more preferably greater than about 30° C., and most preferably greater than about 37° C. Longer DNA fragments may require higher hybridization temperatures for specific hybridization. Since the stringency of hybridization may be affected by other factors such as probe composition, presence of organic solvents and extent of base mismatching, the combination of parameters is more important than the absolute measure of any one alone. An example of “stringent conditions” is prewashing in a solution of 6×SSC, 0.2% SDS; hybridizing at 65° C., 6×SSC, 0.2% SDS overnight; followed by two washes of 30 minutes each in 1×SSC, 0.1% SDS at 65° C. and two washes of 30 minutes each in 0.2×SSC, 0.1% SDS at 65° C.

[0042] All of the binding agents and X- or Y-chromosome specific antigens disclosed herein are isolated and purified, as those terms are commonly used in the art. Preferably, the binding agents and antigens are at least about 80% pure, more preferably at least about 90% pure, and most preferably at least about 99% pure.

[0043] The binding agents disclosed herein may be effectively employed in the separation of X- and Y-chromosome bearing sperm and can therefore be used to enrich a semen sample for either male or female determining sperm. These methods are particularly advantageous in the preparation of semen for use in artificial insemination of mammals including, but not limited to, cows, pigs, sheep, goats, humans, camels, horses, deer, alpaca, dogs, cats, rabbits and rodents. Semen used in such methods may be either fresh ejaculate or may have been previously frozen and subsequently thawed.

[0044] Methods for separating X- and Y-chromosome bearing sperm include contacting a semen sample with one or more of the binding agents disclosed herein for a period of time sufficient to form a conjugate, or complex, between the sperm and the binding agent, and separating the conjugate(s) from unbound sperm. In one embodiment, magnetic beads, such as paramagnetic microspheres, are coated with a binding agent, such as a binding agent specific for a Y-chromosome specific antigen, and then contacted with a suspension of sperm cells in an appropriate vessel for a period of time sufficient to allow formation of a conjugate of the binding agent and the Y-chromosome specific antigen, thereby linking Y-chromosome bearing sperm to the beads. The sperm containing the Y chromosome are then retained by applying a magnetic force to the vessel, whereas the sperm carrying the X chromosome are easily separated by removing the supernatant from the vessel. Techniques employing magnetic beads for the isolation and/or removal of desired cell types are known in the art and include those described, for example, by Olsaker et al. (Animal Genetics, 24:311-313 (1993)) and in U.S. Pat. Nos. 6,893,881 and 7,078,224.

[0045] It will be appreciated that the binding agents disclosed herein may be used in other techniques for separation of desired cell populations well known to those in the art. For example, a native sperm sample may be first exposed to a binding agent disclosed herein, such as an antibody to a Y-chromosome specific antigen, and then to a second antibody that specifically binds to the first antibody, with the second antibody being immobilized on a substrate. Y-chromosome bearing sperm will bind to the first antibody which in turn will bind to the second antibody and become attached to the substrate, thereby separating the Y-chromosome bearing sperm from X-chromosome bearing sperm. Substrates which can be employed in such methods are well known in the art and include, for example, nitrocellulose membranes.

[0046] Kits and/or devices for use in the disclosed methods are also provided. In one embodiment, such kits and/or devices include magnetic particles, such as paramagnetic microspheres, coated with, and/or attached to, at least one binding agent for an X- or Y-chromosome specific antigen. The kits and/or devices may be provided in the form of a single use disposable unit that contains sufficient binding agent to process one ejaculate of sperm.

[0047] The coated magnetic particles may be employed to separate X or Y-chromosome bearing sperm using known methods, such as those disclosed by Safarik and Safarikova (J. Chromatography, 722:33-53 (1999)). When the binding agent is a mouse monoclonal antibody, for example, beads comprising Protein A coupled to magnetizable polystyrene/iron oxide particles, such as MagaBeads™ Protein A (Cortex Biochen. Inc., San Leandro, Calif., USA) may be employed. The binding agent is cross-linked to the beads using standard chemistry with, for example, a DMP crosslinker (dimethyl primelinidate 2 HCI). Other domains/regions may be employed to link the binding agent to an immobilized support, such as magnetic beads. Conditions for release of the sperm from the magnetic beads are optimized in order to avoid damaging the sperm. For example, a low pH and high glycine concentration may be employed.

[0048] In certain embodiments, techniques are employed that both gently release the sperm from binding agent(s) attached to a support (such as magnetic beads) and inactivate the binding agent, thereby preventing its reuse. This can be achieved, for example, by providing a protease recognition site (such as rhino 3c protease) in an exposed part of the framework of the binding agent. Following attachment of the X or Y-chromosome bearing sperm to the immobilized binding agent and removal of the non-bound sperm, protease is employed to cleave the high affinity binding agent, thereby destroying the ability of the binding agent to bind the X or Y-chromosome bearing sperm and releasing the sperm. After cleavage, the sperm can be washed using centrifugation to separate the molecular components from the sperm. The protease recognition site may be partnered with either a disulphide bond or an engineered metal ion binding site (such as calcium, magnesium or zinc) in order to help expose the protease recognition site and/or increase its rate of cleavage by means of reduction or chelation.

[0049] In an alternative embodiment, the protease recognition site is provided on a domain/region linking the binding agent to the immobilized support. Addition of protease results in gentle release of the sperm bound to the binding agent.

[0050] In yet a further embodiment, chelation and reduction, either alone or in combination, may be employed to release the sperm from the binding agent. For example, chelation of a zinc ion engineered or selected to be integral to the binding agent may be employed to release the binding agent from the sperm. Simultaneously, the binding agent may be attached to the immobilized support by means of a disulphide bond. Reduction would then allow removal of the binding agent from the support. In one method, reduction is required for the chelation, thereby preventing reuse of the system.

[0051] Those of skill in the art will appreciate that other methods may be successfully employed for gently releasing the sperm from the immobilized binding agent. For example, biotin could be employed in the site for sperm binding. Subsequent addition of streptavidin would remove the biotin and release the sperm.

[0052] In one embodiment, a device employing magnetic beads for sorting one ejaculate has the specifications described in Table 2 below.

TABLE 2
Bovine

| | |
|---|---|
| Sperm in a straw | 1.00E+07 |
| Number of Sexed x-bearing sperm straws/ejaculate | 100 |
| Total sperm required to begin if recover 50% of | 4.00E+09 |
| desired sperm | |
| Number of sperm in typical bull ejaculate | 1.00E+10 |
| Number of ejaculates required | 0.4 |
| Efficiency of cell purification | 0.7 |
| Number of sperm to extract | 1.43E+09 |
| Ratio beads/cell | 6 |
| Required number of beads | 8.57E+09 |
| Bead concentration/ml | 3.00E+10 |
| Volume in this commercial preparation(ml) | 10 |
| Total beads in 10 ml | 3E+11 |
| Volume of MagaBeads ®-Protein A | 2.86E−01 |
| for a single bovine sexing devices (ml) | |
| Volume of MagaBeads ®-Protein A | 3.43E+03 |
| for 12000 bovine sexing devices (ml) | |

[0053] Alternative methods for isolating X or Y-chromosome bearing sperm employing a specific binding agent include: (i) agglutination followed by filtration; (ii) non-magnetic beads that have two functional groups, for example, protein A and biotin: the beads are used as described above except that, instead of magnetic separation they are reacted with a surface coated with streptavidin or a similar biotin-binding compound; (iii) immobilization of antibody on a support that allows a column chromatography type approach; and (iv) FACs.

[0054] The following examples are offered by way of illustration and not by way of limitation.

### Example 1

### Identification of Candidate Genes by Bioinformatics

[0055] The publicly available bovine genome (available on the Ensembl website; originally released on Aug. 14, 2006; updated version released in February 2007) together with the publicly available human genome, was used in a genomics based method to identify differences on the surface of sexed semen. Specifically, candidate genes were selected using the Ensembl Biomart tool (available on the Ensembl website) and the following strategy:

[0056] 1) identify bovine orthologues of human X chromosome genes that have a transmembrane domain using Biomart and check by manual analysis;

[0057] 2) identify genes in the bovine genome that are present on the X chromosome and have a transmembrane domain by Biomart and check by manual analysis (no sequenced bovine Y chromosome); and

[0058] 3) identify bovine orthologues of human Y chromosome genes that have a transmembrane domain using Biomart and check by manual analysis (one bovine gene was included that could have moved to the X chromosome in bovine).

[0059] After removing redundant hits, a total of 216 candidate genes were identified.

### Example 2

### Prioritization of Candidate Genes Based Upon Expression Levels

[0060] Each candidate gene identified in Example 1 was examined to see if there were splice variants and if so, an exon common to all transcripts was selected. If no suitable exons were present, an exon unique to each transcript was selected for primer design. Exons were employed for primer design, instead of across introns, to allow all the primers to be verified on genomic DNA. Control primers were also designed to ensure the absence of genomic DNA in the cDNA. Primers were designed for real-time PCR using the Primer3 software (available on-line from SourceForge) with a product size of 80-150 bp. All primers were checked using the Blast software to confirm that they could not prime elsewhere in the genome (i.e. that at least the 3′ end base of the primer could not match). The designed primers were then employed in reverse transcription PCR studies to analyse expression of the candidate genes in bovine testis tissue cDNA and bovine genomic DNA.

[0061] Of the initial 216 candidate genes, 136 were shown to be expressed in bovine testis tissue. These genes were then prioritized by applying a criteria based on expression and subcellular location as described below.

[0062] Round spermatids are developing sperm cells that have undergone meiosis and, unlike mature sperm, transcribe RNA. Round spermatids (RS) differentiate into spermatozoa (mature sperm) without cell division and thus represent a good candidate to identify expressed genes in sperm.

[0063] The feasibility of this approach was demonstrated by showing a high correlation between proteins present on the surface of murine sperm and expression of mRNA in murine RS. This comparison was made using data from two high quality publications. The first publication (Stein et al., 2006) assembled 82 proteins present on sperm surface membranes by using a combination of membrane purification and mass spectrometry. The mRNA expression of these 82 proteins was then examined in murine RS provided by the second publication (Shima et al., 2004). Of the 82 genes, there was data for 71 genes and, of these 71, 67 expressed gene at the RNA level (94%). This result demonstrates that mRNA expression in RS is a good indirect measure of sperm proteins.

[0064] The murine data sets were mined further to look at the relative amount of RNA expression in the RS for the gene products known to be present on the cell surface and compared to the RNA expression level for the murine orthologues of the candidates. The results of this analysis, which are shown in FIG. 1, demonstrate that the candidate genes are generally expressed at a much lower level than the random selection of known sperm proteins (approximately 30 of the 71 genes for which there was expression data). These results potentially explain why researchers have so far been unable to discover surface differences between sperm that bear the X or Y chromosome, and indicate that such differences will require very sensitive tools to detect and exploit.

[0065] These results also allowed the candidate genes to be prioritized based upon relative expression amount. Apart from one gene, the proteins detected in Stein et al. (Ibid had an RNA expression level of greater than 40, thus this number was taken as a threshold to focus on the best candidates. The highest priority candidate genes (indicated by the box in FIG. 1) all have a relative expression level of 40 or above, based on the murine orthologue. An examination of other proteins known to be detected by antibodies on sperm indicated a range of expression levels from 9-1000 (see Table 3).

TABLE 3
proteins detected on sperm and their mRNA expression in murine RS

| | mRNA | | |
|---|---|---|---|
| | expression | | |
| | in | | |
| Gene | RS (NCBI | Species sperm | |
| name | GEO) | protein detected in | Reference |
| Ph20 | 1000 | bovine | PMID: 15892045; Morin et |
| spam1 | | | al. Mol. Reprod. Dev. 71: |
| | | | 523-534 (2005) |
| Csf2ra | 65 | human bovine | PMID: 11169747; |
| | | | Zambrano et al. J. Cell |
| | | | Biochem. 80: 625-634 (2001) |
| Csf2rb1 | 20 | human bovine | PMID: 11169747; |
| | | | Zambrano et al. J. Cell |
| | | | Biochem. 80: 625-634 (2001) |
| Trpc1 | 40 | human/mouse | PMID: 12706821; |
| | | | Castellano et al. FEBS Lett. |
| | | | 541: 69-74 (2003); PMID: |
| | | | 11734218; Trevino et al. |
| | | | FEBS Lett. 509: 119-125 |
| | | | (2001) |
| Cnr2 | 14 | boar | PMID: 16144868; |
| | | | Maccarrone et al., J. Cell |
| | | | Sci. 118: 4393-4404 (2005) |
| Cnr1 | 50 | boar | PMID: 16144868; |
| | | | Maccarrone et al., J. Cell |
| | | | Sci. 118: 4393-4404 (2005) |
| drd2 | 47 | rat, mouse, human | PMID: 16924680; Otth et |
| | | and bull | al., J. Cell Biochem. |
| | | | 100: 141-150 (2007) |
| CCR5 | 9 | human | PMID: 16174786; |
| | | | Muciaccia et al., Faseb J. |
| | | | 19: 2048-2050 (2005) |
| il6st | 50 | human | PMID: 16728717; Cai et al. |
| | | | J. Androl. 27: 645-652 |
| | | | (2006) |

PMID = unique Public Medline identifier

### Example 3

### Prioritization of Candidate Genes Based Upon Subcellular Localization

[0066] The low level expression of the candidate genes in round spermatids suggests that, if a candidate resides solely on a membrane other than the cell surface, then these candidates should be given a lower priority. The reason for this action is that, as the candidates already have low expression, this coupled with only a small percentage of the protein being on the surface would make the candidate very difficult to detect. The candidate genes, or their orthologues in other species, were therefore examined to determine the subcellular location of the gene product. If evidence was available that the protein was on a membrane system other than the cell surface, this candidate was given a lower priority. This data was combined with the round spermatid expression data to generate four gene classes of differing priority, with Class I being the highest priority. Each of the Class I bovine candidate genes, which are identified in Table 4 below, have the following properties:
[0067] the murine orthologue gene is expressed above the threshold level (see above) in mouse round spermatids;
[0068] the gene is expressed in bull testis tissue;
[0069] the gene products are very likely to reside in a cell membrane; and the gene products are either known to reside on the cell surface or there is no evidence that the gene products do not reside on the cell surface.

TABLE 4
Class I candidate bovine genes

| | | Amino Acid | DNA SEQ ID |
|---|---|---|---|
| Bovine Gene Ensembl ID | Gene Name | SEQ ID NO: | NO: |
| ENSBTAG00000000520 | ATP2B3 | 1 | 22 |
| ENSBTAG00000005616 | BRS3 | 2 | 23 |
| ENSBTAG00000006296 | Unknown1 | 3 | 24 |
| ENSBTAG00000006818 | FAM11A | 4, 138 | 25, 137 |
| ENSBTAG00000007859 | VSIG1 | 5 | 26 |
| ENSBTAG00000009959 | SLC6A8 | 6, 140 | 27, 139 |
| ENSBTAG00000010018 | ATP7A | 7, 142 | 28, 141 |
| ENSBTAG00000012718 | XK | 8, 144 | 29, 143 |
| ENSBTAG00000013462 | L1CAM | 9 | 30 |
| ENSBTAG00000014798 | CXCR3 | 10 | 31 |
| ENSBTAG00000016484 | ATP11C | 11, 146 | 32, 145 |
| ENSBTAG00000017801 | ATP6AP2 | 12, 148 | 33, 147 |
| ENSBTAG00000019552 | PGRMC1 | 13 | 34 |
| ENSBTAG00000035134 | Unknown2 | 14, 150 | 35, 149 |
| ENSBTAG00000001338 | CCR3 | 15 | 36 |
| ENSBTAG00000002923 | CX3CR1 | 16, 152 | 37, 151 |
| ENSBTAG00000005781 | unknown 3 | 17, 154 | 38, 153 |
| ENSBTAG00000015801 | EFNB1 | 18 | 39 |
| ENSBTAG00000020826 | CHIC1 | 19 | 40 |
| ENSBTAG00000032501 | unknown 4 | 20, 156 | 41, 155 |
| ENSBTAG00000034045 | FMR1NB | 21, 158 | 42, 157 |
| ENSBTAG00000014533 | Kel | 160 | 159 |
| ENSBTAG00000035195 | Unknown 5 | 162 | 161 |
| ENSBTAG00000035944 | Unknown 6 | 164 | 163 |

[0070] Based on comparisons with various mammalian orthologues, certain of the sequences provided in SEQ ID NO: 1-42 were found to have potential prediction errors. Amended, more accurate, sequences are provided in SEQ ID NO: 137-158.

[0071] Human genes corresponding to the candidate bovine genes are identified in Table 5.

TABLE 5
Class I candidate human genes

| | | | Human | Human |
|---|---|---|---|---|
| | | | DNA | Amino |
| Bovine Gene | Human Gene | Human Gene | SEQ ID | Acid SEQ |
| Ensembl ID | Ensembl ID | Name | NO: | ID NO: |
| ENSBTAG00000000520 | ENSG00000067842 | ATP2B3 | 122, 120, | 77, 73, 86, |
| | | PMCA3 | 133, 131, | 84, 80, 88 |
| | | | 127, 135 | |
| ENSBTAG00000001338 | ENSG00000183625 | CCR3 | 95 | 48 |
| ENSBTAG00000002923 | ENSG00000168329 | CX3CR1 | 107 | 60 |
| ENSBTAG00000005616 | ENSG00000102239 | BRS3 | 96 | 49 |
| ENSBTAG00000005718 | ENSG00000124103 | unknown 3 | 97, 94, 91 | 50, 47, 44 |
| ENSBTAG00000006296 | ENSG00000160131 | Unknown1 | 118, 123 | 71, 76 |
| ENSBTAG00000006818 | ENSG00000155984 | FAM11A | 117 | 80 |
| ENSBTAG00000007859 | ENSG00000101842 | VSIG1 | 90 | 43 |
| ENSBTAG0000009959 | ENSG00000130821 | SLC6A8 CTI | 119, 121, | 72, 74, 75 |
| | | | 124 | |
| ENSBTAG00000010018 | ENSG00000165240 | ATP7A | 110, 100, | 63, 53, 54, |
| | | | 101, 93, | 46, 59 |
| | | | 106 | |
| ENSBTAG00000014798 | ENSG00000186810 | CXCR3 | 108, 112, | 61, 65, 62 |
| | | | 109 | |
| ENSBTAG00000015801 | ENSG00000090776 | EFNB1 | 92 | 45 |
| ENSBTAG00000016484 | ENSG00000101974 | ATP11C | 111, 126, | 64, 79, 68, |
| | | | 115, 114, | 67, 78 |
| | | | 125 | |
| ENSBTAG00000017801 | ENSG00000182220 | Renin | 102 | 55 |
| | | receptor | | |
| ENSBTAG00000019552 | ENSG00000101856 | PGRMCI | 105 | 58 |
| ENSBTAG00000020826 | ENSG00000204116 | CHIC1 | 99, 98 | 52, 51 |
| ENSBTAG00000034045 | ENSG00000176988 | FMR1NB | 113, 116 | 66, 69 |
| ENSBTAG00000035134 | ENSG00000189118 | Unknown2 | 104 | 57 |
| ENSBTAG00000014533 | ENSG00000197993 | Kel | 202 | 201 |

[0072] Equine genes corresponding to the candidate bovine genes are identified in Table 6.

TABLE 6
Class I candidate equine genes

| | | | Equine | Equine |
|---|---|---|---|---|
| | | | DNA | Amino |
| Bovine Gene | Equine Gene | Equine | SEQ ID | Acid SEQ |
| Ensembl ID | Ensembl ID | Gene name | NO: | ID NO: |
| ENSBTAG00000001338 | ENSECAG00000001282 | CCR3 | 165 | 183 |
| ENSBTAG00000013462 | ENSECAG00000002810 | L1CAM | 166 | 184 |
| ENSBTAG00000002923 | ENSECAG00000004442 | CX3CR1 | 167 | 185 |
| ENSBTAG00000035134 | ENSECAG00000005133 | | 168 | 186 |
| ENSBTAG00000016484 | ENSECAG00000005393 | ATP11C | 169 | 187 |
| ENSBTAG00000005616 | ENSECAG00000008806 | BRS3 | 170 | 188 |
| ENSBTAG00000006818 | ENSECAG00000009399 | Fam11a | 171 | 189 |
| ENSBTAG00000019552 | ENSECAG00000009619 | PGRMC1 | 172 | 190 |
| ENSBTAG00000014533 | ENSECAG00000010525 | KEL | 173 | 191 |
| ENSBTAG00000015801 | ENSECAG00000012319 | EFNB1 | 174 | 192 |
| ENSBTAG00000009959 | ENSECAG00000013965 | | 175 | 193 |
| ENSBTAG00000012718 | ENSECAG00000014332 | XK | 176 | 194 |
| ENSBTAG00000020826 | ENSECAG00000016317 | CHIC1 | 177 | 195 |
| ENSBTAG00000010018 | ENSECAG00000016767 | ATP7A | 178 | 196 |
| ENSBTAG00000007859 | ENSECAG00000018968 | VSIG1 | 179 | 197 |
| ENSBTAG00000017801 | ENSECAG00000019889 | ATP6AP2 | 180 | 198 |
| ENSBTAG00000000520 | ENSECAG00000023490 | ATP2B3 | 181 | 199 |
| ENSBTAG00000014798 | ENSECAG00000023587 | CXCR3 | 182 | 200 |

[0073] Apart from three genes, all the Class I candidate genes were selected from the X chromosome of either human, cow or horse. Two exceptions, which are both chemokine receptors, were from two papers where the authors observed that, when staining sperm with antibodies specific for the chemokine receptors (CCR3 & CX3CR1), only 50% of the sperm stained (Muciaccia et al., Faseb J. 19:2048-2050 (2005); Zhang et al., Hum. Reprod. 19:409-414 (2004)). Both these chemokine receptors are tightly clustered on bovine chromosome 22 and, upon inspection of their promoter regions, it is possible that GATA-1, an X-encoded transcription factor, may bind and control their expression (DeVries et al., J. Biol. Chem. 278:11985-11994 (2003); Garin et al., Biochem. J. 368:753-760 (2002); Vijh et al., Genomics 80:86-95 (2002); Zimmermann et al., Blood 96:2346-2354 (2000)). The other exception kel is the disulphide linked partner of the XK protein (Lee et al., Semin. Hematol. 37:113-121 (2000); Russo et al., Biochim. Biophys. Acta 1461:10-18 (1999); Russo et al., J. Biol. Chem. 273:13950-13956 (1998)).

[0074] The mouse orthologue of one of the candidate genes disclosed herein (pgrmcl; mouse protein ENSMUSG0000006373; bovine protein ENSBTAG00000019552, SEQ ID NO: 13) has been shown to be present on sperm membrane in a proteomic study by Stein et al. (Proteomics 6:3533-3543 (2006); see also, Baker et al., Proteomics 8:1720-1730 (2008)). In addition, the mouse orthologue of another Class I candidate antigen identified using the methods described herein (mouse protein ENSMUSG00000031130: bovine protein ENSBTAG0000005616; SEQ ID NO: 2) has been shown to be expressed on developing sperm (Fathi et al., J. Biol. Chem. 268:5979-5984 1993)).

### Example 4

### Generation of Antibody Detection Reagents and Testing of Expressed Genes for Presence on the Sperm Surface

[0075] The availability of the Class I candidate genes enabled them to be examined closely for potential errors in their predicted sequence. Based upon comparison with other mammalian orthologues, several candidate genes were discovered to have potential prediction errors and new gene models were created and tested by cloning either portions of the cDNA or the entire open reading frame and sequencing these regions. The configuration of the Class I candidate proteins in the membrane was either determined from the literature or modelled, and used in the selection of peptides for antibody generation.

[0076] For each of the Class I candidate genes, a specific strategy was developed to show the protein is present on the surface of sperm and verify that the gene product is specific for either X- or Y-chromosome bearing sperm. These strategies, which are shown in Table 7 below, include using bovine and/or human sperm, together with obtaining antibodies from a combination of commercially available and/or generation of antibodies through two different peptide-based approaches and, for three of the candidate genes, expression and purification of the recombinant proteins.

TABLE 7

| SEQ | | | |
|---|---|---|---|
| ID | | Membrane | |
| NO: | Gene name | type | Strategy |
| 1 | ATP2B3 | 10TM | Commercial antibodies and Siscapa |
| | PMCA3 | | approach |
| 15 | CCR3 | 7TM | Commercial antibodies |
| 16 | CX3CR1 | 7TM | Commercial antibodies |
| 2 | BRS3 | 7TM | Commercial antibodies plus Siscapa |
| | | | approach |
| 17 | unknown 3 | Type I | Peptide antibodies and Siscapa approach |
| 3 | Unknown 1 | 2TM | Peptide antibodies and Siscapa approach |
| 4 | FAM11A | 8TM | Peptide antibodies and Siscapa approach |
| 5 | VSIG1 | Type I | Express extracellular domain and |
| | | | generate antibodies, and also Siscapa |
| | | | approach |
| 6 | SLC6A8 | 12TM | Peptide antibodies, one commercial |
| | CT1 | | Antibody and Siscapa approach |
| 7 | ATP7A | 8TM | Commercial antibodies and Siscapa |
| | | | approach |
| 8 | XK | 10TM | Commercial antibodies (both XK and |
| | | | Kell) and Siscapa approach |
| 9 | L1CAM | Type I | Commercial antibodies and Siscapa |
| | | | approach |
| 10 | CXCR3 | 7TM | Commercial antibodies |
| 18 | EFNB1 | Type I | Express extracellular domain and |
| | | | generate antibodies, and also Siscapa |
| | | | approach |
| 11 | ATP11C | 10TM | Peptide antibodies, also buy one peptide |
| | | | human antibody and Siscapa |
| 12 | Renin | Type I | Express extracellular domain and |
| | receptor | | generate antibodies and also Siscapa |
| | | | approach |
| 13 | PGRMC1 | 1TM | Peptide antibodies one commercial |
| | | | antibody and Siscapa approach |
| 19 | CHIC1 | 1TM | Peptide antibodies and Siscapa approach |
| 20 | unknown 4 | Type I | Peptide antibodies and Siscapa approach |
| 21 | FMR1NB | 2TM | Peptide antibodies, one commercial |
| | | | antibody and Siscapa approach |
| 14 | Unknown2 | 4TM | Peptide antibodies only |

[0077] Peptide-generated antibodies often have a range of titres and do not necessarily recognize native proteins or proteins denatured on SDS-PAGE gels. Additionally, integral membrane proteins (the majority of the Class I candidates) are often difficult to solubilize and thus get into PAGE gel systems (Peirce et al., Mol. Cell Proteomics 3:56-65 (2004); Santoni et al., Electrophoresis 21:3329-3344 (2000)). Our solution to these problems was the following: generate multiple peptide-antibodies per protein and use a variety of detection techniques for these antibodies, such as direct cell surface binding (Flow cytometry), cell lysis assays, antibody sperm capture, Western blotting and/or immunohistochemistry of fixed sperm cells. In another strategy that overcomes some of the problems of peptide-generated antibodies, mass spectrometry is used to detect the candidate sperm surface proteins.

[0078] These experiments have two goals: first determine if any of the candidate genes are present in the sperm; and second, if present, determine whether the candidate is on the plasma membrane, determine distribution across sperm bearing either the X or Y chromosome and confirm the identity of bound species. To achieve a high assay throughput, where possible a robotic station in conjunction with 96/384 well plates was used to setup and perform the assays.

a) Production of Antibodies and/or Antisera

[0079] Peptides for production of antibodies to the Class I candidate antigens of SEQ ID NO: 1-9, 11-14 and 17-21 were designed using the strategies described below. Two design strategies were followed for peptide selection/design. In the first strategy, standard peptide design rules were applied to design peptides that bind preferentially to surface exposed epitopes, however if insufficient surface epitopes were available cytoplasmic epitopes were used. Briefly, the approach for designing peptides was as follows: chose the N-terminus, C-terminus and small loops connecting transmembrane domains (that had been mapped on the sequence; predicted signal sequences were removed from the sequence for peptide selection); and choose a sequence that had a suitable hydrophilicity (−0.5 to 0.5), did not begin with glutamic acid or glutamine, did not have any cys residues, did not have a likely glycosylation site and was not closely related to other proteins. All peptides have a linker usually at the c-terminus (GSGC) to enable specific coupling to the carrier protein, ELISA plate and/or agarose for affinity purification of the antisera. However, for peptides that were at the very C-terminus of a protein, the linker CGSG was added to the N-terminus. In the second strategy, peptides were designed for use in the SISCAPA technique according to the methodology of Anderson et al. (J. Proteome Res. 3:235-244 (2004)). Essentially, this technique is an ELISA with the detection phase being mass spectrometry.

[0080] Following peptide design and production, peptides were conjugated to the carrier KLH and employed to immunize rabbits, using standard techniques for the production of antisera. Peptides may also be conjugated to a second carrier to act as a positive control in various assays. Alternatively, ELISA plates having a covalently attached malemide (cys reactive) group may be employed. For each candidate gene, two peptides were simultaneously immunized into a rabbit and two rabbits were immunized for each pair of peptides. This approach is efficient in its use of animals, maximises the likelihood of obtaining antibodies with the required activity and, with affinity purification of the antibody, provides monospecific antisera (Larsson et al., J. Immunol. Methods 315:110-120 (2006); Uhlen and Ponten, Mol. Cell. Proteomics 4:384-393. (2005)).

[0081] Antisera were tested for recognition of the immunizing peptide by ELISA. In brief, purified peptide was attached specifically to the ELISA plate through the free sulphydral group (cys residue) on each peptide. The free thiol group was reacted with ELISA microplates that have a maleimide surface (Corning) thus allowing irreversible binding of the peptide via the thiol group. Following peptide binding, the antisera (both pre-immune and final bleed) was titrated against the peptide. Subsequently HRP-conjugated anti-rabbit antibodies were added and the signal developed using OPD.

[0082] The results indicated that for the 54 peptides employed in the immunizations, antisera that had a specific peptide binding titre of 0.001 or less was achieved for 25 peptides. The antiserum with a titre less than 0.001 was purified on columns with the peptide specifically attached through the free thiol group by standard techniques. Desalted antibodies were used in subsequent assays.

### b) Binding of Antibodies to Candidate Gene Products

[0083] The specificity of antibodies for candidate gene products was determined as follows. The genes for the majority of candidates were cloned to enable their use as positive controls. The genes were either purchased or cloned and then transferred to the Invitrogen expression vector pcDNA™3.2/V5-DEST. These plasmids were used to transiently transfect HEK 293T cells by the calcium phosphate method. After 48-72 hours, the cells were either scraped from the culture dishes for use in flow cytometry studies or used directly to create whole cell lysates.

[0084] The ability to compare HEK cells mock transfected or transfected with the appropriate expression vector and subsequent flow cytometry analysis with the candidate antibodies allowed verification that the antibodies were specific for the candidate gene products. These results are summarized in the Table 8 below.

TABLE 8

| | Identification of antibodies that show |
|---|---|
| | specific binding to transiently transfected |
| Candidate | HEK293T cells by flow cytometry |
| CCR3 | (SC32777; SC7897; MAB155) |
| CX3CR1 | (SC20432; SC30030) |
| BRS3 | (SC33404) |
| FAM11A | GN21352) |
| VSIG1 | (VSIG) |
| XK | SC50201; SC50202) |
| Kel | (IBGRL9440; IBGRL9441; AF1914) |
| L1CAM | (SC33686; SC31034; SC53386; SC15326) |
| CXCR3 | (SC57076; SC9900) |

c) Assays for Agents that Bind the Candidate Gene Products

[0085] As the nature of binding of peptide-generated antibodies to the target protein is hard to predict (i.e. whether the antibody will recognize the native protein and/or denatured versions), a variety of assays are used. Assays to examine binding of antibodies or other agents to the candidate gene products include the following as classified by the starting material and the assay used (see FIG. 2):
[0086] Class I assays: Intact sperm assays using either flow cytometry, cell lysis and/or immunopurification;
[0087] Class II assays: Fixed sperm assays using either immunohistochemistry type approaches and/or a flow cytometry readout; and
[0088] Class III assays: Sperm surface membrane protein preparation followed by Western blotting, SISCAPA and/or iTraq approach.

### Class I Assays

[0089] These assays use living sperm either fresh or thawed from aliquots frozen in liquid nitrogen. Bovine sperm are purified by Percoll™ gradients to produce a viable, highly motile, morphologically normal and fertilizable population of sperm (Samardzija et al., Anim. Reprod. Sci. 91:237-247 (2006); Trentalance and Beorlegui, Andrologia 34:397-403 (2002)). This procedure has been used previously on both fresh and frozen sperm. The Class I assays utilize the antibodies/binding agents described above and detection comprises flow cytometry and Alexa Fluor conjugated secondary antibodies (Invitrogen Corp., Carlsbad, Calif.) as a reporter system, immunocapture of sperm with paramagnetic beads, and also immunoprecipitation followed by detection of the released trypsin digested proteins by mass spectrometry.

### Class II Assays

[0090] The rationale for using immunohistochemistry is that fixation can alter protein epitopes and may make certain epitopes available that are not in the native protein. Before use, bovine sperm are purified on Percoll™ gradients and then fixed with a range (3-4) of different fixatives. Again the antibodies/binding agents described above are used and the readout for binding is flow cytometry or an ELISA plate-based format.

### Class III Assays

[0091] The class III assays are likely to be the most sensitive for detection of low abundance antigens. Again bovine sperm are purified on Percoll™ gradients and sperm plasma membrane protein fractions are then prepared by two different techniques. The first method biotinylates the surface of intact sperm, with the plasma membrane proteins subsequently being isolated on nutra-avidin and used in various assays (Zhao et al., Anal. Chem. 76:1817-1823 (2004)). A second method for plasma membrane protein preparation involving more traditional nitrogen cavitation/sedimentation and detergent solubilization (Lalancette et al., Biol. Reprod. 65:628-636 (2006)) can also be used. Two different techniques for membrane protein isolation are used as all methods have some selectivity towards isolation of different proteins.

[0092] After the enrichment of the sperm plasma membrane the sample is used in the following three assays:

[0093] (i) Western Blotting

[0094] The key issue for western blotting is getting sufficient amount of the enriched plasma membrane protein into the gel for PAGE while still allowing the gel to resolve well and provide sufficient sensitivity. Before loading the plasma membrane enriched sample onto the PAGE gel, further simple fractionation may be used, such as a simple size cut-off using spin columns e.g. retain material above 10 Kd. Detergents/phase separation may also be used to select for membrane proteins of certain types, for example single-pass or multi-pass (Santoni et al., Electrophoresis 21:3329-3344 (2000)). Overall, the aim is to create knowledge-based enrichment (using the candidate gene information) without creation of additional samples, thus candidate genes may be grouped for various treatments. In one embodiment, proteins are first immunoprecipitated with several antibodies and the captured proteins then identified using western blotting.

[0095] (ii) SISCAPA

[0096] The outline of the SISCAPA technique is shown in FIG. 3. The major difference from the standard technique is that a different starting material will be used, namely sperm plasma membrane as opposed to human plasma proteins, and the isotopically labelled peptide will be omitted.

[0097] The SISCAPA technique was designed to specifically identify and quantify proteins in human plasma that change with various metabolic or disease states (Anderson et al., 2004, Ibid). This powerful technology has several advantages:
[0098] Uses antibodies to enrich the sample peptides, thus reducing the complexity for mass spectrometry analysis;
[0099] Antibodies raised against peptides almost always recognise the peptide, unlike the parent protein;
[0100] Spiked peptides (isotopically labelled in Anderson's case) allow the mass spectrometer to unambiguously identify the peptide and also quantitate the endogenous protein. In the current studies, the SISCAPA method is performed using the same peptide as used for immunization instead of the istopically labelled peptide. This peptide acts as a standard to determine the flight characteristics of the peptide in the mass spectrometer. The peptides employed in the current studies have a GSGC linker, however this will be after a basic residue and thus digesting the peptide with trypsin will provide the exact peptide as an internal control for the mass spectrometer;
[0101] The trypsin digestion of the starting sample also has significant advantages, particularly for membrane proteins where digesting to peptides enables solubilization and separation, tasks that are considerably more difficult with the hydrophobic parent proteins; and
[0102] The amount of sample applied to the antibodies is not limited, thus enabling a very large number of sperm cell plasma membranes (>10⁸ cell equivalents) are to be passed over the antibodies, which in turn provides the technique with potentially very high sensitivity.

[0103] (iii) iTRAQ™

[0104] Applied Biosystems iTRAQ™ reagents are a multiplexed set of four isobaric reagents which are amine specific and yield labelled peptides which are identical in mass and hence also identical in single MS mode, but which produce strong, diagnostic, low-mass MS/MS signature ions, allowing for quantitation of up to four different samples simultaneously. Protein identification is simplified by improved fragmentation patterns, with no signal splitting in either the MS or MS/MS modes and the complexity of MS and MS/MS data is not increased by mixing multiple proteome samples together. The current studies employ the iTRAQ™ technology as depicted in FIG. 4. In contrast to other techniques employed in the current studies, the sperm are first sorted by flow cytometer into two populations bearing either the X or Y chromosome. These sorted samples are then used with the iTRAQ™ reagents.

### Example 5

### Antibody Binding to Sperm Cells and Analysis By Flow Cytometry

[0105] For ten of the candidate genes disclosed herein, antibodies specific for the candidate proteins were shown to bind sperm from either human, bovine or both using flow cytometry as follows.

[0106] Fresh sperm were purified by centrifugation on Percoll™ (GE Healthcare) discontinuous density layers. Following washing, visual microscopic inspection of sperm showed an essentially pure population of sperm. Human sperm derived from a single ejaculate had a range of concentration (20-60 x10⁶/ml) with a total count of 40−120×10⁶ sperm, motility as assessed visually averaged >60%. Bovine sperm average concentration was 1.5×10⁹/ml with a total count of approximately 10×10⁹ sperm, motility as assessed visually averaged greater than 70%. The Invitrogen LIVE/DEAD Sperm Viability Kit (SYBR-14/propidium iodide) was used to assess viability of purified sperm. Generally sperm showed greater than 80% viability as assessed by the Sperm Viability Kit. In addition, analysis by Lysotracker™ (Invitrogen) showed that less than 20% of sperm were acrosome reacted and that this fraction equated to the dead population from the sperm viability analysis.

[0107] Antibody staining of purified sperm was performed by standard techniques. Briefly, purified sperm were incubated with their primary antibodies, washed and labeled with Alexa Fluor 488™ conjugated secondary antibodies. Before analysis, cells were also stained with propidium iodide. Dead sperm were excluded by propidium iodide staining and for each analysis 30,000 events were collected in a Becton-Dickinson FACScalibur.

[0108] The results of these studies are summarized in Tables 9 and 10 below. Where specific binding of candidate antibodies to sperm was shown, this was also achieved for sperm samples from more than one individual.

TABLE 9

| | Number of antibodies showing | Identification of |
|---|---|---|
| | binding to human sperm by flow | antibodies that show |
| | cytometry as a proportion of | binding to human sperm |
| Candidate | those tried | by flow cytometry |
| CCR3 | 2/3 | SC7897; MAB155 |
| CX3CR1 | 2/3 | SC20432; SC30030 |
| BRS3 | 1/2 | SC33404 |
| FAM11A | 1/2 | GN21352 |
| VSIG1 | 0/1 | |
| XK | 2/3 | SC50201; SC50202 |
| Kel | 3/3 | IBGRL9440; IBGRL9441; |
| | | AF1914 |
| L1CAM | 3/5 | SC31034; SC53386; |
| | | SC15326 |
| CXCR3 | 2/4 | SC57076; SC9900 |
| FMR1NB | 1/1 | FMR1NB |

TABLE 10

| | Number of antibodies showing | |
|---|---|---|
| | binding to bovine sperm by flow | Identification of antibodies |
| | cytometry as a proportion of | that show binding to bovine |
| Candidate | those tried | sperm by flow cytometry |
| CCR3 | 1/3 | SC7897 |
| CX3CR1 | 1/3 | SC30030 |
| BRS3 | 1/2 | SC33404 |
| FAM11A | 1/2 | GN21352 |
| VSIG1 | 1/1 | VSIG |
| XK | 2/3 | SC50201; SC50202 |
| Kel | 3/3 | IBGRL9440; IBGRL9441; |
| | | AF1914 |
| L1CAM | 2/5 | SC53386; SC15326 |
| CXCR3 | 2/4 | SC57076; SC9900 |
| FMR1NB | 1/1 | FMR1NB |

[0109] The percentage of sperm cells showing specific binding varied depending upon the antibody as shown in Table 11 below.

TABLE 11

| | | Sperm | |
|---|---|---|---|
| | | species | Sperm cells |
| | | used for | showing |
| | | binding | specific |
| Antigen | Class | experiment | binding (%) |
| XK; ENSG00000047597 | Candidate | Human | 24.2 |
| CCR3; ENSG00000183625 | Candidate | Human | 31.7 |
| BRS3; ENSG00000102239 | Candidate | Human | 10.7 |
| CX3CR1; ENSG00000168329 | Candidate | Human | 10.5 |
| CXCR3; ENSG00000186810 | Candidate | Human | 11.9 |
| FMR1NB; ENSG00000176988 | Candidate | Human | 29.7 |
| FAM11A; | Candidate | Bovine | 8.4 |
| ENSBTAG00000006818 | | | |
| KEL; ENSG00000197993 | Candidate | Human | 14.4 |
| L1CAM; ENSG00000198910 | Candidate | Human | 19.0 |
| VSIG1; | Candidate | Bovine | 5.2 |
| ENSBTAG00000007859 | | | |
| CD55 | Control | Human | 71.0 |

[0110] For the examples showing a higher percentage of binding, namely XK, CCR3, FMR1NB and L1CAM, there is clear evidence of antibody binding in a bimodal distribution, a first peak coincident with the secondary antibody only peak and a second distribution with approx. 1-100 fold more fluorescence. The antibodies that displayed a lower percentage of cells binding showed a skewing of the fluorescence distribution (relative to the secondary only antibody peak) with 1-10 fold more fluorescence. These results contrast with the data obtained from using anti-CD55 antisera as an antibody known to bind to the sperm surface. This antibody specifically bound to 71% of the sperm, however there was only a uni-modal binding distribution for both the secondary antibody alone and also the primary and secondary antibody together, although for the latter binding the whole peak shifted due to the greater fluorescence. As antibody binding is a function of number of binding sites available and the affinity of the antibody, the less than 50% of cells binding antibody may indicate that there is very low expression of molecules on the sperm surface (below detection with the reagents used) and/or that not all sperm bear the candidate antigens.

[0111] In general more antibodies bound to human sperm than bovine sperm. This result would be expected as the majority of the antibodies were generated to human proteins. The candidate proteins are in general highly conserved between human and bovine, however small changes in amino acid sequence (depending upon the epitope) may lower the affinity of the antibody for the protein.

### Example 6

### Antibody Binding to Sperm Cell Preparations and Analysis by Western BLOT

[0112] The ability of antibodies to candidate gene products to bind sperm cell preparations was examined by Western blot as follows.

[0113] Purified sperm were subjected to sonication, nuclei were removed by centrifugation and the total membrane fraction isolated by ultra-centrifugation. Protein from the membrane fraction were separated on 8% Bis-Tris polyacrylamide gels (Invitrogen) and transferred to nitrocellulose membrane (NC; Invitrogen i-Blot). The NC membrane was blocked with non-fat milk, incubated with a primary antibody specific for the protein of interest and then with Horseradish-peroxidase conjugated secondary antibodies. The blot was developed with chemiluminescent ECL Western blotting substrate and signals detected using a LAS-3000 imaging system (Fuji).

[0114] The antibody AF914 specific for human kel was used in a western blot to detect a band that ran just below the 100 kD. The band appeared in the lane loaded with a membrane preparation from 0.8×10⁸ human sperm. An almost identical size band was also western blot loaded with whole cell lysates from HEK cells transfected with the pCDNA vector expressing the human kel gene. In contrast whole cell lysates from untransfected HEK cells did not show antibody specific binding.

[0115] An antibody made in rabbits to the recombinant extracellular domain of the bovine EFBN1 gene was used to probe western blots of bovine sperm. In these experiments membrane preparations from 1×10⁹ human sperm were run on SDS-PAGE, blotted to nitrocellulose and the anti-EFBN1 antibody used to detect the EFBN1 protein. The sperm membrane lane showed a bans present at 50 kd. An identical lane probed with the pre-immune antiserum did not show a similar band. The human EFBN1 that is 96% identical at the amino acid level has been shown to run at 50 kD (PMID 17567680).

### Example 7

### Verification that Sperm Sex Specific Antigens have been Identified

[0116] Indications that sex specific antigens have been identified by “hits” in the various assays are verified as follows. This verification involves two aspects: first that the anticipated molecule is being recognised; and second that the protein recognised is actually on the surface of the cells and also that the protein segregates with sperm bearing the X or Y chromosome. Some of the assays above indicate strongly the characteristics required, for example immunopurification with intact sperm indicates that the molecule is surface exposed. However, the technique does not indicate segregation with the X or Y chromosome. This feature may be established by flow cytometry, PCR and/or FISH analysis as described below. When using flow cytometry, the sperm size distribution is examined as used by Johnson et al. (Johnson, Anim. Reprod. Sci. 60-61:93-107 (2000)). For analysis by PCR, primers specific for the X and Y chromosomes are used with real time PCR to quantitate the distribution of the sex chromosomes with sperm cells (Alves et al., Theriogenology 59:1415-1419 (2003); Kageyama et al., J. Vet. Med. Sci. 66:509-514 (2004); Parati et al., Theriogenology 66:2202-2209 (2006)). Other techniques, such as western blotting and SISCAPA indicate the identity of the molecule being bound by the agent.

### a) Flow Cytometry

[0117] In this experimental design, sperm are stained with candidate antibodies that have been shown to bind sperm and the primary antibodies are recognized with Alexa Fluor™ conjugated secondary antibodies (Invitrogen). The cells are simultaneously stained with Hoechst 33342-dye (the dye used for flow cytometric sex sorting of sperm based on DNA content). This approach allows the sperm to be stained for both DNA content and binding agent recognition (Johnson et al. Hum. Reprod. 8:1733-1739 (1993)). Sperm labelled with the candidate antibodies that specifically bind X-chromosome specific antigens will be enriched for sperm that bear the X-chromosome (i.e. those that bind more of the Hoechst dye).

b) Flow Cytometry Sorting Coupled with Real Time PCR

[0118] In this study, sperm that bind candidate antibodies on the flow cytometer are sorted into two populations, namely those with staining and those without. DNA is prepared from the two populations and the quantity of X- and Y-chromosome in each sample is determined by real-time PCR for example by the use of the Quantifiler® Duo DNA Quantification Kit (Applied Biosytems) This approach enables accurate relative quantification of X and Y chromosomes present in the two populations.

[0119] A variant of this approach is to employ the candidate binding antibodies with magnetic beads to sort the sperm into two populations (binding and non-binding) and then use the flow cytometer to measure DNA content (and hence determine X:Y ratio) or Real-time PCR to indicate the ratio of X- and Y-chromosome on the selected cells.

### c) FISH (Fluorescent In Situ Hybridization) Analysis

[0120] A method that allows determination of the X:Y ratio in candidate antibody-bound sperm is to use FISH probes specific for the X- and Y-chromosome. In this approach, sperm are first bound to the primary candidate antibody followed by a fluorescently labelled secondary antibody. The cells are subsequently fixed, permeabilized, and stained with the FISH probes. After a washing step, the cells are viewed under a fluorescent microscope and the X:Y staining ratio of sperm positive for the candidate antibody are determined.

[0121] While the present invention has been described with reference to the specific embodiments thereof, it should be understood by those skilled in the art that various changes may be made and equivalents may be substituted without departing from the true spirit and scope of the invention. In addition, many modifications may be made to adapt a particular situation, material, composition of matter, method, method step or steps, for use in practicing the present invention. All such modifications are intended to be within the scope of the claims appended hereto.

[0122] All of the publications, patent applications and patents cited in this application are herein incorporated by reference in their entirety to the same extent as if each individual publication, patent application or patent was specifically and individually indicated to be incorporated by reference in its entirety.

[0123] SEQ ID NO: 1-202 are set out in the attached Sequence Listing. The codes for nucleotide sequences used in the attached Sequence Listing, including the symbol “n,” conform to WIPO Standard ST.25 (1998), Appendix 2, Table 1.

I claim:

1. A method for separating of X- and Y-chromosome bearing sperm in a sperm sample, comprising:
(a) contacting the sperm sample with at least one binding agent that specifically binds to an X- or Y-chromosome specific antigen for a period of time sufficient to form a conjugate between the binding agent and the X- or Y-chromosome bearing sperm; and
(b) separating the antibody-sperm conjugate from unbound sperm, wherein the X- or Y-chromosome specific antigen comprises a sequence selected from the group consisting of: (i) SEQ ID NO: 1-21, 43-89, 138, 140, 142, 144, 146, 148, 150, 152, 154, 156, 158, 160, 162, 164 and 183-201; (ii) sequences having at least 85%, 90% or 95% identity to a sequence of SEQ ID NO: 1-21, 43-89, 138, 140, 142, 144, 146, 148, 150, 152, 154, 156, 158, 160, 162, 164 and 183-201; and (iii) sequences encoded by a polynucleotide sequence that hybridizes to a sequence of SEQ ID NO: 22-42, 90-136, 137, 139, 141, 143, 145, 147, 149, 151, 153, 155, 157, 159, 161, 163, 165-182 or 202 under stringent hybridization conditions.

2. The method of claim 1, wherein the binding agent is an antibody or an antigen-binding fragment thereof.

3. The method of claim 2, wherein the binding agent is a Fab or an scFv.

4. The method of claim 2, wherein the antibody is selected from the group consisting of: antibodies identified in Table 1 above.

5. The method of claim 1, wherein the binding agent is attached to a solid support.

6. The method of claim 1, wherein the binding agent is provided on the surface of one or more magnetic beads, and the antibody-sperm conjugate is separated from unbound sperm by application of a magnetic field.

7. The method of claim 1, wherein step (b) comprises contacting the sperm sample with a second binding agent that specifically binds the binding agent that specifically binds to an X- or Y-chromosome specific antigen, the second binding agent being immobilized on a substrate.

8. The method of claim 1, wherein the binding agent is provided with a protease recognition site and the method further comprises contacting the antibody-sperm conjugate with protease after separation from unbound sperm, whereby separated sperm is released from the antibody-sperm conjugate.

9. The method of claim 1, wherein the sperm sample is enriched for X-chromosome bearing sperm.

10. A kit for the separation of X- and Y-chromosome bearing sperm in a sperm sample, comprising: (a) a container holding at least one binding agent specific for an X- or Y-chromosome specific antigen, wherein the X- or Y-chromosome specific antigen comprises a sequence selected from the group consisting of: (i) SEQ ID NO: 1-21, 43-89, 138, 140, 142, 144, 146, 148, 150, 152, 154, 156, 158, 160, 162, 164 and 183-201; (ii) sequences having at least 85%, 90% or 95% identity to a sequence of SEQ ID NO: 1-21, 43-89, 138, 140, 142, 144, 146, 148, 150, 152, 154, 156, 158, 160, 162, 164 and 183-201; and (iii) sequences that are encoded by a polynucleotide sequence that hybridizes to a sequence of SEQ ID NO: 22-42, 90-136, 137, 139, 141, 143, 145, 147, 149, 151, 153, 155, 157, 159, 161, 163, 165-182 or 202 under stringent hybridization conditions; and
(b) instructions for using the kit.

11. The kit of claim 10, wherein the binding agent is an antibody or an antigen binding fragment thereof.

12. The kit of claim 11, wherein the binding agent is a Fab or an scFv.

13. The kit of claim 11, wherein the antibody is selected from the group consisting of:
antibodies identified in Table 1 above.

14. The kit of claim 10 wherein the binding agent is attached to a solid support.

15. The kit of claim 10, wherein the binding agent is provided on the surface of one or more magnetic beads.

16. A composition comprising separated sperm prepared according to the method of claim 1.

17. A method for enriching a semen sample for either X- or Y-chromosome bearing sperm, comprising contacting the semen sample with at least one binding agent that specifically binds to an X- or Y-chromosome specific antigen for a period of time sufficient to form a conjugate between the binding agent and the X- or Y-chromosome bearing sperm, wherein binding of the X- or Y-chromosome bearing sperm to the binding agent is effective in reducing at least one of mobility and activity of the sperm, and wherein the X- or Y-chromosome specific antigen comprises a sequence selected from the group consisting of: (i) SEQ ID NO: 1-21, 43-89, 138, 140, 142, 144, 146, 148, 150, 152, 154, 156, 158, 160, 162, 164 and 183-201; (ii) sequences having at least 85%, 90% or 95% identity to a sequence of SEQ ID NO: 1-21, 43-89, 138, 140, 142, 144, 146, 148, 150, 152, 154, 156, 158, 160, 162, 164 and 183-201; and (iii) sequences encoded by a polynucleotide sequence that hybridizes to a sequence of SEQ ID NO: 22-42, 90-136, 137, 139, 141, 143, 145, 147, 149, 151, 153, 155, 157, 159, 161, 163, 165-182 or 202 under stringent hybridization conditions.

18. The method of claim 17, wherein the binding agent is attached to a cytotoxin.

The application's sequence listing, which the Patent Office published only in electronic form, follows.

SEQUENCE LISTING (202 sequences)

SEQ ID NO: 1 - protein, 1220 aa, Bovine
MGDVANSSIEFHPKPQQQREAPHAGGFGCTLAELRSLMELRGAEALQKVQEAYGDVSGLCRRLKTSPTEGLADNANDLEKRRQIYGQNFIPPKQPKTFLQLVWEALQDVTLIILEVAAIVSLGLSFYAPPGEESEACGNVSAGAEDEGEAEAGWIEGAAILLSVICVVLVTAFNDWSKEKQFRGLQSRIEQEQKFTVIRNGQLLQVPVATLVVGDIAQVKYGDLLPADGVLIQGNDLKIDESSLTGESDHVRKSTDKDPMLLSGTHVMEGSGRMVVTAVGVNSQTGIIFTLLGAGGEEEEKKDKKGKQQDGAMESSQTKAKKQDGAVAMEMQPLKSAEGGEMEEREKKKANVPKKEKSVLQGKLTKLAVQIGKAGLVMSAITVIILVLYFVIETFVIDGRMWLAECTPVYVQYFVKFFIIGVTVLVVAVPEGLPLAVTISLAYSVKKMMRDNNLVRHLDACETMGNATAICSDKTGTLTTNRMTVVQSYLGDTHYKEVPAPSALTPKILDILVHAISINSAYTTKILPPEKEGALPRQVGNKTECALLGFVLDLKRDFQPVREQIPEDKLYKVYTFNSVRKSMSTVIRTPDGGFRLFSKGASEILLKKCTNILNSNGELRSFRPRDRDDMVKKIIEPMACDGLRTICIAYRDFTAAQEPDWDNENEVVGDLTCIAVVGIEDPVRPEVPEAIRKCQRAGITVRMVTGDNINTARAIAAKCGIIQPGEDFLCLEGKEFNRRIRNEKGEIEQERLDKVWPKLRVLARSSPTDKHTLVKGIIDSNTGEQRQVVAVTGDGTNDGPALKKADVGFAMGIAGTDVAKEASDIILTDDNFTSIVKAVMWGRNVYDSISKFLQFQLTVNVVAVIVAFTGACITQDSPLKAVQMLWVNLIMDTFASLALATEPPTESLLLRKPYGRDKPLISRTMMKNILGHAVYQLTIIFTLLFVGELFFDIDSGRNAPLHSPPSEHYTIIFNTFVMMQLFNEINARKIHGERNVFHGIFSNPIFCTIVLGTFAIQIVIVQFGGKPFSCSPLSTEQWLWCLFVGIGELVWGQVIATIPTSQLKCLKEAGHGPGKDEMTDEELAEGEEEIDHAERELRRGQILWFRGLNRIQTQIRVVKAFRSSLYEGLEKPESKTSIHNFMATPEFLINDYTHNIPLIDDTDVDENEERLRAPPPPSPNQNNNAIDSGVYLTTHGTKSATSSLFSSRPGSPLHSVETSL

SEQ ID NO: 2 - protein, 399 aa, Bovine
MSQRQPQSPNQTLISTTNDTELSSSVVPNDSTNKRRTGDNSPGIEALCAIYITYAVIISVGILGNAILIKVFFKTKSMQTVPNIFITSLAFGDLLLLLTCVPVDATHYLAEGWLFGRIGCKVLSFIRLTSVGVSVFTLTILSADRYKAVVKPLERQPPNAILKTCAKAGCIWIMSMIIALPEAIFSNVYTFQDPDKNVTFKVCASYPVSERLLQEIHSLLCFLVFYIIPLSIISVYYSLIARTLYKSTLNIPTEEQSHARKQIESRKRIARTVLVLVALFALCWLPNHLLYLYRSFTSQNYTDSSTVHLIVTIISRILAFSNSCVNPFALYWLSNTFQQHFKAQLFCCKAGVPDASAANTPLDNLAVMGRVPGAASTQMSEISVSLFTGCSVKKEDDRV

SEQ ID NO: 3 - protein, 150 aa, Bovine
PQIGGRGRNGDESCSRALRGRPQHRPPRRTMLRGKSRLNVEWLGYSPGLLLERRPLLAGRTPRSPGRNESSLASTLKTLLFFTALMITVPIGLYFTTKSYVFEGAFGMSNRDSYFYAAIVAVVAVHVVLALFVYVAWNEGSRQWREGKQD

SEQ ID NO: 4 - protein, 346 aa, Bovine
GLFQDFNPSKFLIYACLLLFSVLLALRLDGIIQWSYWAVFAPIWLWKLMVIVGASVGTGVWARNPQYRAEGETCVEFKAMLIAVGIHLLLLMFEVLVCDRIERGSHFWLLVFMPLFFVSPVSVAACVWGFRHDRSLELEILCSVNILQFIFIALRLDKIIHWPWLVVCVPLWILMSFLCLVVLYYIVWSVLFLRSMDVIAEQRRTHITMALSWMTIVVPLLTFEILLVHKLDGHNAFSCIPIFVPLWLSLITLMATTFGQKGGNHWWFGIRKDFCQFLLEICPFLREYGNISYDLHHEGSEETEETPVPEPPKIAPMFRKKTRVVITQSPGKYVLPPPKLNIEMPD

SEQ ID NO: 5 - protein, 382 aa, Bovine
MGLTFWKVFLILNCLAGQVNGVQVTIPDSFVNVTVGSDVTLICTYATTVASLNKLSIQWTFFHKEASQPVSIYYSEGGQATAIGKFKDRIVGSNTSGNASITISHMQPEDSGIYICDVNNPPDFFGKNQGTISVSVLVKPSKPFCSIQGIAETGHPISLTCLSVLGTPSPVYYWYKLEGRNIVPVKENFNPATGILFIGNLTTFEQGYYQCTAINILGNSSCEIDLTTPYPGIGIIVGAFVGTLIGVIIIISVVWFVRRKVKAKGKERKRNSKTTTELEPMTKINQRTEGETMPREDAIQLEATLPSSTHETEPNATLGPDHEPIPEPEPALQPTVEPPSGPELVPMSELEIQLEPEPAPQQEPEPLIVDEPFCDEEKVIKP

SEQ ID NO: 6 - protein, 548 aa, Bovine
GVFLIPYILIALIGGIPIFFLEISLGQFMKAGSINVWNICPLFKGLGYASMVIVFYCNTYYIMVLAWGFYYLVKSFTTTLPWATCGHTWNTPDCVEIFRHEDCANATMANLTCDQLADRRSPVIEFWENKVLRLSEGLEVPGALNWEVTLCLLTCWVLVYFCVWKGVKSTGKIVYFTATFPYVVLVVLLVRGVLLPGALDGIIYYLKPDWSKLASPQVWIDAGTQIFFSYAIGLGALTALGSYNRFNNNCYKDAIILALINSGTSFFAGFVVFSILGFMATEQGVHISKVAESGPGLAFIAYPRAVTLMPVAPLWAALFFFMLLLLGLDSQFVGVEGFITGLLDLLPASYYFRFQREISVALCCTICFVIDLSMVTDGGMYVFQLFDYYSASGTTLLWQAFWECVVVAWVYGADRFMDDVACMIGYRPCPWMKWCWSFFTPLVCMGIFIFNVVYHEPLVYNNTYVYPWWGEAVGWAFALSSMLCVPLHLLGCLLRAKGTMAERWQHLTQPIWGLHHLEYRAQDSDVRGLTTLTPVSESSKVVVVESVM

SEQ ID NO: 7 - protein, 1504 aa, Bovine
EEIKMDLSVSVNSVTISVEGMTCSSCVWTIEQQIGKLNGVHHIKVSLEEKNATVIYDPKLQTPKTLQEAIDDMGFDAILHNPKPLPVLTETVFLTVTASLVPPWDHIQSTLLKTKGVTDIKISPQQRTAVVTIIPSIVNANQIVELVPDLSLDTGTLEKKSGTCEDYSMAQPGEVMLKMKVEGMTCHSCTSTIEGKIGKLQGVQRIKVSLDNQEATVVYQPHLITAEEIKKQIEVVGFTAFIKKQPKYLKLGAIDIERLKNTPVKSSEGSQQKSPSYTSNSTVIFTIDGMHCKSCVSNIESALSTLQHISSVVVSLENKSAIVKYNASLVTPETLRKAIEAISQGQYRVSSASEIESTSNSPSSSSLQKSPLNIVSQPLTQETVINIDGMTCNSCVQSIEGVISKKAGVKSIQVSLANGKGTVEYDPLLTSPETLREAIENMGFDASLSDTNEPLVVIAQPSSEMPLLTSTNEFHTKMMTPIHDKEEPKTSSKCYIQVTGMTCASCVANIERNLRREEGIYSILVALMAGKAEVRYNPALIQPPVIAELIRELGFGSTVIENADEGDGVLELVVRGMTCASCVHKIESTLTKHRGIFYCSVALATNKAHIKYDPEIIGPRDIIHTIESLGFEASLVKKDRSASHLDHKREIRQWRRAFLVSLFFCIPVMGLMIYMMVMDHHLASLQHNQNMSQEEMINIHSSMFLERQILPGLSIMNLLSFLLCVPVQFFGGWHFYIQAYKALKHKTANMDVLIVLATTIAFAYSLVILLVAMYERAKVNPVTFFDTPPMLFVFIALGRWLEHVAKGKTSEALAKLISLQATEATIVTLDSDNILLSEEQVDVELVQRGDIIKVVPGGKFPVDGRVIEGHSMVDESLITGEAMPVAKKSGSTVIAGSINQNGSLLIRATHVGADTTLSQIVKLVEEAQTSKAPIQQFADKLSGYFVPFIVIVSIATLLVWIIIGFLNFEIVETYFPGYNRSISRTETIIRFAFQASITVLCIACPCSLGLATPTAVMVGTGVGAQNGILIKGGEPLEMAHKVKVVVFDKTGTITHGTPVVNQVKVLVESNRISRNKILAIVGTAESNSEHPLGAAITKYCKQELDTETLGTCIDFQVVPGCGINCKVTNIEALLHKNNWKIEENNIKNASLVQIDESNEQSSTSSSMIIDAQFSNALNAQQYKVLIGNREWMIRNGLAINNSVNDSMTEHERRGRTAVLVAVDDELCGLIAIADTVKPEAELAVHILKSMGLEVVLMTGDNSKTARSIASQVGITKVFAEVLPSHKVAKVKQLQEEGKRVAMVGDGINDSPALAMANVGIAIGTGTDVAIEAADVVLIRNDLLDVVASIDLSRKTVKRIRINFVFALIYNLIGIPIAAGVFMPIGLVLQPWMGSAAMAASSVSVVLSSLFLKLYRKPTYENYELHARNQMGQKSPSEISVHVGIDDTSRNSPKLGLLDRIVNYSRASINSLLSDKRSLNSVGTSEPDKHSLLVGDCREDDDSAL

SEQ ID NO: 8 - protein, 445 aa, Bovine
MKFPGSVLASVFLFVAETSAALYNMVIHNFKGNAPFIVITKLFMLTPTCMVSGTLIKLVNHEPSRGRGLCNLEHLLDLKFVSRCFEVFCIYCQSNHIEEPYVSITKKRQIPKNGHSEEIEKEVGQAEGKLFTHRSAFSRASVIQAFLGSAPQLTLQLYISVLQQDVSIGRCLFMVLSLLSIVYGALRCNILAIKIKYDEYDVKVKPLAYVCIFLWRSFEIVTRVIVLVLFTSVLKAWVVIDILINFLGFLFYPWILFWCSGSPFPENFEKAFSRLGTTIVLCFLTLLYAGINMFCWSAVQLKINNPDLISKSQNWYRLLVYYMVRFIENAFLLLMWYLYKTDIYMYVCAPLLMLQLLIGYCTAILFMVVFYQFFHPCKKLFSPNASESFQEWLKCACCNRRRRESCESAENTDLRSPTDREETPSSSKISSMPSQILNTDELSSA

SEQ ID NO: 9 - protein, 1257 aa, Bovine
MAVALWFLWPLLLCSPCVLIQIPEEYEGHHVMEPPIITEQSPRRVVVFPTDDVSLKCEASGKPEVQFRWTRDGILFKPREELGMIVNQVPHSGSFSITGNSSNFAQSFQGTYRCFASNKLGTAMSHEIQLMAEGTPKWPKETVKPVEVEEGESVILPCHPPPSAEPLRIYWMNSKILHIKQDERVTMGQNGNLYFANVLTSDNHSDYICHAHFPGTRTIIQKEPIDLRVKATNSMMDRKPHLLFPTNSSSHLVALQGQPLILECIAEGFPTPTIKWLRPSGPMPADRVTYQNHNKTLQLLNVGEEDDGEYRCLAENSLGSDRHAYYVTVEAAPYWLHKPQSHLYGPGETARLDCQVQGRPQPEVTWRINGIPVEELGKDQKYRIHHGALVLSNLQPSDTMVTQCEARNRHGLLLANAYIYVVELPAKILTPDNETYMAVQGSTAYLLCKAFGAPVPSVQWLDREGKTVLQDERFFPYTNGTLGIRDLQTNDTGHYFCQAANDQSNVTIVANLQVKDATRIMQGPRSAIEKRGSRVMFTCQASFDPSLQHSTTWRRDALDLQELGDSDKYFIEDERLVIHSLDYSDQGNYSCVASTKLDVVESRAELLVVGSPGPVPQLELSDHHLLKQSQVRLSWSPADDHNAPIEKYDIEFEDKEMAPEKWYSLGKVPGNQTSTTLKLSPYVHYTFRVTAINKYGPGEPSPDSETVVTPEAAPEKNPVDVKGEGNETNNMVITWKPLRWMDWNAPQVQYRVQWRPQKMQGAWQEQIVSDPFLVVSNTSTFVPYEIKVQTVNSQGKGPEPQITIGYSGEDYPQASPLLEPVKALNSSTVLVRWQSVDPAQVKGHLRGYNVTYWWEGSQRKHNKRHVHKGHVVVPANATSTILGGLRPYSSYWVEVQAFNGRGLGPASGMTFNTPEGVPGHPEALHLECQSDTSLLLHWQPPLSHNGVLTGYVLSYQPLNDGSKEQLSFDLPDPELRTHNLTNLSPRLRYRFQLQATTREGPGEAIVREGGTMALSGMPDFGNISAMAGENYSVVSWVPKEGQCNFGFQIWFKALGDEKLVARLPPQYVSYNQSSYTQWDLQPDTDYEIQLLKEQVLLHQMAVKTNGTGRVRLPPAGFATEGWFIGFISAIVVLLLVLLILCFIKRSKGGKYSVKDKEDTQVDSEARPMKDETFGEYRSLESDNEEKAFGSSQPSLNGDIKPLGSDDSLADYGGSVDVQFNEDGSFIGQYSGKKEKEVAGGNDSSGATSPINPAGTLE

SEQ ID NO: 10 - protein, 366 aa, Bovine
MVPEMSERQEFQASDFAYLLENSSYDYGENETYFCCTSPPCPQDFSLNFDRTFLPVLYSLLFVLGLLGNGIVAVVLLSQRAALSSTDTFLLHLAVADALLVLTLPLWAVDAAIQWVFGSGLCKVAGALFNINFYAGALLLACISFDRYLSIVHATQLYRRGPPTRVALTCVAVWGLCLLFALPDFIFLSSHHDNRLNATHCQYNFPQEGHTALRILQLVAGFLLPLLVMAYCYARILAVLLVSRGQRRLRAMRLVVVVVVAFALCWTPYHLVVLVDTLMDLGALARNCGRESSVDIAKSVTSGMGYMHCCLNPLLYAFVGVKFRERMWVLLVRLGCPDQRCHQRQPSASRRESSWSETTEASYSGL

SEQ ID NO: 11 - protein, 802 aa, Bovine
EKLICFPLSLGQCAGEEKRVGTRTVFVGNHPVSETEAYIAQKFCDNRIISSKYTLWNFLPKNLFEQFRRIANFYFLIIFLIQVTVDTPTSPITSGLPLFFVITVTAIKQGYEDWLRHRADNEVNKSTVYIIENAKRVKKESEKIKVGDIVEVQADETFPCDLILLSSCTVDGTCYVTTASLDGESNCKTHYAVRDTIELRTVESIDNLRAAIECEQPQPDLYKFVGRINIYSNSIEAVARSLGPENLLLKGATLKNTKKIYGVAVYTGMETKMALNYQGKSQKRSAVEKSINAFLIVYLFILLTKAAICTTLKYVWQSTPHNDEPWYNQKTQKERETWKVLKMFTDFLSFMVLFNFIIPVSMYVTVEMQKFLGSFFISWDNDFYDEEINEGALVNTSDLNEELGQVDYVFTDKTGTLTENTMEFIECCIDGHKYKGVAQETDGLSQTDGPLPYLDRADKNREELFLRALCLCHTVEVKPNDTVDGVTESSELTYMSSSPDEIESEITGGQRYGFTFVGVQNGYMRVENQRKEIEEYELLHTLNFDAVRRRMSVIVKTQTGDILLFCKGADSAVFPRVQNHEIDLIKVHVEHNAMEGYRTLCIAFKEIAPDDYERVNRQLIEAKMALQDREEKMEKVFDEIETDMHLIGATAVEDKLQDQAAETIEALHAAGLKVWVLTGDKMETAKSTCYACRLFQTNTELLELTTKTIEESERKEDRLHELLTEYRKKLLHEFPKSTRSLKKAWTEHQEYGLIIDGSTLSLILNSSQDSGSNNYKSIFLQICMKCTAVLCCRMAPLQKAQV

SEQ ID NO: 12 - protein, 339 aa, Bovine
SDVFGNEFSILRSPGSVVFRNGNWPIPGERIPDVAALSMGFSVKEDLSWPGLAVGNLFHRPRATVMVMVKGVDKLALPPGSVISYPLENAVPFSLDSVANSIHSLFSEETPVVLQLAPSEERVYMVGKANSVFEDLSVTLRQLRNRLFQENSVLTSLPLNSLSRNNEVDLLFLSELQVLRDISSLLSRHKHLAKDHSPDLYSLELAGLDEIGKHYGEDSEQFRDASKILIDALQKFADDMYNLYGGNAVVELVTVRSFDTSLVRKTRNILETKQVKDPSTTYNLAYKYNFEYPVVFNLVLWIMIGLALTLIVTCYNIWNMDPGYDSIIYRMTNQKIRMD

SEQ ID NO: 13 - protein, 194 aa, Bovine
MAAEDVAATGADTSELESGGLLQEIFTSPLNLLLLGLCIFLLYKIVRGDQPAASDSDDDEPPPLPRLKRRDFTPAELRRFDGVQDPRILMAINGKVFDVTKGRKFYGPEGPYGVFAGRDASRGLATFCLDKEALKDEYDDLSDLTPAQQETLSDWDSQFTFKYHHVGKLLKDGEEPTVYSDEEEPKDESTRKND

SEQ ID NO: 14 - protein, 214 aa, Bovine
YTSTMSLLINSANCQIVGFAVATIGWILGTTAMGFVEWRVWYLDNASQFSGLACMGMWRVCVFRQTNITTATSCHSYSYHDTYLPLDIRVSQHLLLMASILGLLGKASVTFALKNVSMGILENTTTYKAFVISGILHIAAGICISVAVIWNYHSVMTEEGIVFPPSFNIPFKPYAQKIGNTVIVACLAAFALFLGGWFFLSYKLPLDNQVHPEV

SEQ ID NO: 15 - protein, 358 aa, Bovine
MATSADGIETVGEVAGTTPYDYEAALPCEKSNVKELAAQFLPPLYSLVFVTGLLGNVVVVVILTKYKRLRIMTNIYLLNLAISDVLFLFTLPFWIHYVRWNEWVFGHRMCKLLSGLYYMGLYSEIFFIILLTIDRYLAIVHAVFALRARTVTFGIVTSIFTWVLAGLAALPEFFFHETQEEAGQTFCSPLYPEDNENAWKRFHALRMNILGLALPLLVMAICYSGIIKTLLRCPSKKKYKAIRLIFVIMVVFFIFWTPYNLVVLLFAFQMHLKADCEQSRQLDLAMLVTEVIAYTHCCVNPVIYAFVGERFRKHLRHFFHRYMATYLGKFMPFLPSEKLERTSSVSPSTGEQELSAVF

SEQ ID NO: 16 - protein, 360 aa, Bovine
LTMHTTLPESTSENFEYYDLAEACDMGDIVALGTVFVVILYSLVFAFGLVGNLLVVFALINSQRSKSITDIYLLNLALSDLLFVATLPFWTHYVINEQGLHHATCKLITAFFFIGFFGGIFFITVISVDRFLAIVLAANSMSNRTVQHGVTTSLGVWAAAILVATPQFMFTREKENECFGDYPEILQEIWPVILNTEINFLGFLLPLLIMSYCYFRIMQTLFSCKNHKKAKAIRLIFLVVVVFFLFWTPYNVMIFLQTLNLYDFFPKCDVKRDLKLAISVTETIAFSHCCLNPLIYAFAGEKFRRYLYRLYRKCLAVLCCHPDHLSFSSSLSESQRSRRESVLSSNFTHYTSDGDASILL

SEQ ID NO: 17 - protein, 153 aa, Bovine
MWSLKSFLCLSIVVSCVYALMFTSLTEKVKEIQWKVLCRGHFLIQQNLQEQAQDWLEITLLWLFFIVLMYVTVKLAGENGESRVQTSHALQGRSFGFLGNKKVKTSSKEVYMFHTLTLLEMDLVKFVCRVQNLKLATSTSGNINPLNVKVPAD

SEQ ID NO: 18 - protein, 346 aa, Bovine
MARPGQRWLGKWLVAMVVLALCRLATPLAKNLEPVSWSSLNPKFLSGKGLVIYPKIGDKLDIICPRAEAGRPYEYYKLYLVRPEQAAACSTVLDPNVLVTCNRPEQEIRFTIKFQEFSPNYMGLEFKKHHDYYITSTSNGSLEGLENREGGVCRTRTMKIVMKVGQDPNAVTPEQLTTSRPSKEADNTIKMATQAPGGRSSMGDSDGKHETVNQDEKSGSGGNGGSSGDPDSFFNSKVALFAAVGAGCVIFLLIIIFLTILLLKLRKRHRKHTQQRAPALSLSTLASPKGGSGTAGTEPSDIIIPLRTTENNYCPHYEKVSGDYGHPVYIVQEMPPQSPANIYYKV

SEQ ID NO: 19 - protein, 225 aa, Bovine
MSILLPNMAEFDTISELEEEEEEEAATSSSSSPSSSSSVSGPDDDEEDEEEEEEENEEEEEEEEEQVEETPPPPRVVSEEHLRRYAPDPVLVRGAGHITVFGLSNKFDTEFPSVLTGKVAPEEFKTSIGRVNACLKKALPVNVKWLLCGCLCCCCTLGCSLWPVICLNKRTRRSIQKLLEWENNRLYHKLALHWKLTKRKCETSNMMEYVILIEFLPKYPIFRPD

SEQ ID NO: 20 - protein, 173 aa, Bovine
QLTMRSVIWLFFWPTLISFVFAYVFYVLRDEAEELPWMVPSGRHFRVRQNQPEYAPGWFGSKWHWLLIFLMFLVILKFPGGDDESNAGTPPGRQGCSSGSPGRKKIRDSPYKESMCGALTQSETSLMNLMSRVKNMKLTAATGDQCQCPNIEVPGDARNNVTILEVWDTGDPD

SEQ ID NO: 21 - protein, 92 aa, Bovine
TMLKSLSCILFLKACVPVEGQVLTPCKQGQDLNKDECLKYKCCYSSIETATVSCFAPLRDSKLILLQMFGFGAMSMVFLGCLPMYCCSFCWK

SEQ ID NO: 22 - DNA, 3663 bp, Bovine
atgggcgacgtggccaacagttccatcgagttccaccccaaaccccagcagcagcgggaggccccacatgcaggtggcttcgggtgcacgctggccgagctgcgctccctcatggagctccggggggccgaggcactgcagaaagtccaggaggcctatggggacgtgagcgggctttgcaggaggctgaagacctcacccaccgagggcctggctgacaatgccaacgacctggagaagcgcaggcagatctacgggcagaacttcatcccccccaagcagcccaagacctttctacagctggtgtgggaggccctgcaggatgtgaccctcatcatcctggaggtggctgccatcgtgtccctgggcctctcattctatgcaccgcccggggaggagagcgaagcctgtgggaatgtgtcggctggggccgaagacgaaggggaagccgaggcgggctggatcgagggggccgccatcctgctgtctgtcatctgcgtggtcctggtcacggccttcaacgactggagcaaagagaagcagttccgaggcctgcagagtcgcatagagcaggagcagaagttcaccgtcatccggaatgggcagctcctccaggtgcccgtggccacgctcgtggtgggagacatcgcccaggtcaagtatggagacctgctgcctgccgatggcgtgctcatccagggcaacgacctcaagatcgatgagagctccctgacgggcgagtcggaccatgtgcgcaagtcgacagacaaggaccccatgctgctgtcaggcactcatgtcatggaaggttctggaagaatggtggtgacggctgtgggtgtgaattcccagacgggcatcatctttaccttgcttggagctggtggagaggaggaagagaagaaggataagaaaggcaagcagcaggatggggcgatggagagtagccagaccaaagcaaagaaacaggatggggctgttgccatggaaatgcagcccctaaagagcgcagagggcggggagatggaggagcgggagaagaagaaagccaatgtgcccaagaaggagaaatcagtccttcagggaaagctcaccaaactggccgtgcagattgggaaagcagggctggtgatgtccgccatcactgttatcatcctggtcctctactttgtgatcgagaccttcgtcatagacggccggatgtggctggcggagtgcacgcctgtctacgtgcagtacttcgtcaagttcttcatcatcggtgtcactgtgctggttgtggctgtcccagagggcctgcctctcgctgtcaccatctccttagcttactctgtcaagaaaatgatgagggacaacaacctggtccgccacctggatgcctgcgagaccatgggcaatgccacagccatctgttctgacaagacgggcacactcaccaccaaccgcatgaccgtggtgcagtcctaccttggggacacccactacaaagaggttccagcccccagtgccctgacccccaagatcctcgacatcctggtccatgccatctccatcaacagtgcctacaccaccaaaatactacctccagagaaggaaggcgccctcccacgccaagtgggcaacaagacggagtgtgctctgcttggctttgtcctggacctcaagcgggacttccagccggtgcgggagcagattcccgaagataagctttataaagtgtacaccttcaactcggtccgcaagtccatgagcacggtcatccgcacgcctgatggtggcttccgcctcttcagcaagggcgcctcagagatcctgctgaaaaagtgcaccaacatcttgaacagcaatggggaactccgcagctttcgccctcgggaccgggatgacatggtgaagaagatcatcgagccgatggcctgcgatgggctccgcaccatttgcatcgcctaccgggacttcaccgccgcccaggagcccgactgggacaatgagaacgaggtggtgggcgacctcacctgcatagccgtcgtgggcatcgaggaccctgtgcggcccgaggtccctgaagctatccgcaaatgtcagagggctggcatcacagtccgcatggtgacgggggacaacatcaacacagctcgcgccattgcagccaagtgtggcatcatccagcccggggaggacttcctgtgcctggaggggaaagagttcaaccggcggatccgaaacgagaaaggcgagatagaacaggagcgtctggacaaggtgtggcctaagctgagggtcctggcgcgatcatctcccaccgacaaacatactctggttaaagggatcatcgacagcaacacgggtgagcaacggcaggtggtggccgtgacaggagatggcaccaatgacgggccagccctcaagaaggcagatgtgggcttcgccatgggcatcgcagggacagatgtggccaaggaggcctcagacatcatcctgacggacgacaacttcaccagcatcgtcaaggctgtcatgtggggccgcaatgtctacgacagcatctccaagttcctgcagttccagctgacggtcaacgtggtggccgtgattgtggccttcacgggcgcctgcatcactcaggactctcctctcaaagccgtgcagatgttgtgggtgaatttgatcatggacacattcgcctctctggctctggcaacagagccacccactgagtcgctgctgctgcggaagccatacggccgggacaagcccctgatctcacggaccatgatgaagaacatcctgggccatgccgtctaccagctcaccatcatcttcaccctgctctttgtcggggagctcttctttgacattgacagtggacggaacgctcccctgcactcgccaccctctgagcactacaccatcatcttcaacaccttcgtcatgatgcagctcttcaacgagatcaatgcccgcaagatccatggcgagcgcaatgtgttccatggcatcttcagcaaccccatcttctgcaccatcgtgctaggaacctttgctatccagattgtcatcgtccagttcggtggaaagcccttcagctgttccccactgtccacggagcagtggctctggtgcctgtttgtcggtattggggaactggtctggggacaggtcatcgcaaccatccccaccagccagcttaagtgcctgaaggaagcaggacatgggcccgggaaggatgagatgactgacgaggagctggctgaaggagaagaagagattgaccacgccgagcgggagctccgcagaggccagatcctctggttccggggcctcaaccggatccagacacagattcgggtggtgaaagcgttccgtagctccctctacgaaggcctggagaaaccagaatccaagacctccatccataacttcatggcgacgcctgagtttctgatcaatgactacacccacaacatcccgctgattgacgacacggacgtggatgagaacgaggaacgcctgcgagccccaccgccgccctcccccaaccagaataacaatgccatagacagcggcgtctacctgaccacgcacggcaccaagtcagctacctcttcactgttttcttccagacccgggagcccgctccacagcgtggagacgtccctctaa

SEQ ID NO: 23 - DNA, 1200 bp, Bovine
atgtctcaaaggcagcctcagtcacctaatcagactttaatttcaaccacaaatgacacagaattatcgagctccgtcgtccctaatgattccacaaataaaagaaggaccggagacaactctccaggaatagaagcattgtgtgccatctatatcacttatgccgtgatcatttcagtgggcatccttggaaatgctattctcatcaaagtctttttcaagaccaaatccatgcaaacagttcccaacattttcatcaccagcctggcttttggagatcttttacttctgctaacttgtgtgccagtcgatgcaacccactacctggcagagggatggctgttcggaagaattggatgtaaggtgctctctttcatccggctcacttctgtcggtgtatcagtgttcacgttaacaattctcagtgctgacagatacaaggcagttgtgaagcccttggagcgtcagcccccaaatgccatcctgaagacctgtgccaaagctggctgcatctggatcatgtctatgatcattgctctaccggaggctatattttcaaatgtatatacttttcaagatcctgacaaaaacgtaacatttaaagtgtgtgcctcttaccctgtttctgagaggctcctgcaagagatacattctctgctgtgcttcttagtattctacattattccactttcgattatctctgtctattactctctgattgctagaactctttacaaaagcaccttgaacatacctactgaggaacaaagccatgcccgcaagcagattgaatcccggaagcgaattgccagaacagttctggtgctggtggctctctttgctctctgctggttgccgaatcaccttctgtatctctaccgctcattcacttctcaaaactatacggactcctctaccgttcacttaattgtcaccatcatctctcggattctggctttcagcaattcttgtgtaaacccctttgctctttactggctgagcaataccttccagcagcattttaaagctcagttattctgttgcaaggcaggggtgcctgacgcttctgctgctaatacccctcttgacaacctagcagtgatgggaagggtcccgggtgctgcaagcactcagatgtccgaaattagtgtgtccctattcactggctgcagtgtgaagaaggaagatgacagagtctag

SEQ ID NO: 24 - DNA, 453 bp, Bovine
ccacagatcggcggcaggggccggaacggagacgagagctgctcgcgcgcgctcagggggcggccgcagcaccgccctccccggaggacaatgctgcgaggcaagtcccggctcaacgtggagtggctgggctactcgcccggcctgctcctagagcgcaggccgctcctggcagggcgtacgccccgcagccctggccgaaatgaaagttcattagcatccactctgaagacgctcctgttcttcacagctttaatgatcactgtacctattgggttatatttcacaactaaatcttacgtttttgaaggcgcctttgggatgtccaatagggacagctatttttatgctgctattgttgcagtggtcgccgtccacgtggtgctggccctctttgtttatgtggcctggaatgaaggctcacggcagtggcgtgaaggcaaacaggattaa

SEQ ID NO: 25 - DNA, 1541 bp, Bovine
aggggccttttccaggacttcaacccgagtaaattcctcatctatgcctgtctactgctgttctctgtgttgctggcccttcgtctagatggcatcattcagtggagttactgggctgtttttgctccaatatggctgtggaagttaatggtcattgttggagcctcagttggaactggagtctgggcacggaatccccaatatcgagcagaaggggaaacatgtgtggagttcaaggccatgctaattgcagtgggcatccacttgctgttgctgatgtttgaagtgctggtgtgcgacaggattgagagaggcagccacttctggctcctggtcttcatgccactcttcttcgtttcccccgtgtctgtggcagcttgtgtttggggctttcgccatgacaggtcactggagttagaaatcctgtgttctgtcaacattctccagtttatattcattgccttaagactggacaagatcattcactggccctggcttgtcgtgtgtgtccccttgtggattctcatgtcgtttctgtgtctggtagtcctctactacatcgtgtggtccgtcctgttcctgcgttccatggatgtgatcgcagagcagaggaggacacacatcaccatggcgctaagctggatgaccatcgttgtgccactccttacttttgagatcctgctggttcataagctggacggccacaatgcattctcctgtatccccatatttgtccccctttggctttccttgatcactctgatggcaaccaccttcggacagaaaggcggaaaccactggtggtttgggattcgcaaggatttctgtcagtttctgcttgaaatctgcccgtttttgagagaatatggaaacatctcctacgacctccaccatgaaggtagcgaggaaactgaagaaacgccagttccagaacctcctaagatcgctcctatgtttcgaaagaagacccgggtggttatcacccagagccctgggaagtacgtcctcccacctcccaaattaaatatcgaaatgccagattagaccgtgttcccagggcagatcaagagtgcacctggcccgccctcttttccaccttcttctgcctccattcaccccctccctcccaccctgaactggagctggagctgggtctccagggacttccatctcatgccttgtttgcactcaatgcctacccagtgactcaccgccacgggacatgcggctggcaggtgcctggaacatgcagcgtggtgtagggtgcacatcagcggatttggacctgatggagggagcatatggagacagaggaaacaactcccagtgggcaggtgccttcagagctggcttgggcccaagaaggaatggccacccagctggttttctaagtgtgaaaattcccatcaaaagtgttattgaaaaatgtattattgaaccaagccagcctggccacttagctcagaaactcctgttgtggtgtggtcaggggccctgactaagcctcaggcctcacatgcacccacaccactgtcactggc

SEQ ID NO: 26 - DNA, 2339 bp, Bovine
agtttgagactcagcctagctcaggcaagctactggaccttgactgcgctcagcgaacctcagcacaatggggttaacattttggaaggtgtttctgattctcaactgccttgcaggtcaagttaatggagtgcaagtgaccatcccagacagttttgtgaatgtgactgttggatctgatgtcactctcatctgcacctacgccaccactgtggcctcactgaacaaactctccattcagtggacattcttccataaggaggcgtcacaaccagtttctatttactattctgaaggtggacaagctacagccataggaaaatttaaagatcgcattgtaggatccaacacttcaggtaacgcatccatcaccatctcgcatatgcagccagaagacagtggcatctacatctgtgatgttaacaacccccctgactttttcggcaaaaatcaaggcaccatcagcgtcagcgtgttagtcaaaccttctaagcccttctgcagcatccaaggaatagcagaaactggccatcctatatctcttacttgcctttcggtgcttggaacaccttcccctgtgtactactggtataaacttgaaggaagaaacattgtcccagtgaaagaaaacttcaacccagccaccgggattttgtttattggaaacctgaccacttttgaacaaggttattaccagtgcaccgctattaacatacttggcaatagttcctgtgaaattgacctaactactccatatccaggaattggaatcattgttggggcctttgtggggaccctgataggtgtcatcatcatcatctctgtggtgtggttcgtgaggcgtaaggtaaaggcaaaggggaaggaaaggaagaggaattctaaaaccaccacagaactcgaaccaatgacaaagataaaccaaagaacggagggtgagacaatgccacgtgaagatgccatccaactcgaagccacccttccgtcttccacccatgagactgagcctaatgctaccctggggccagatcatgagcctatccccgagcctgagcctgccttgcagcctactgtggagccaccctctgggcctgagcttgtccccatgtctgagcttgagatccagctggagccagagcctgcgccccagcaggagcccgagcccttgattgtagatgagccattttgtgatgaggagaaggtgattaagccataggccagcggcctgagtccaatgttcatcaccaaggaacccattagtggcatgtggaattgagttgacctaactaatttcccaccacctgcctccattctggccaaccctcttctaacatggagctcttaccatcaatccagaataactactaaataaacgcaagggttcctgcattaccagtctagagtacttaatttcactaacctgtaaacacaattaatgacaagtgattctgaactcagttgaaggtgttttgccacaacacctgtgtcttatttcagaaatcttatttctctatttttagctactctttggcattccacatgcacacatgacaaggtgccattaactggattgaatattatttcttggatttgctgttatcagagcttccctattcattttcacattgatcagtacgaattcaccagcattatctcatagactgggaaaaaaaatccttaaaattccagagaagaaagggtacctattaattagtacataccatttaaaactaggtcttaaaattaatgcttcatttatcgtattagatttcccagagaaccactctgctatccaatatctgagcacagcaaaattttaaattaaatcaactttttaaatgcaaaataatgtacaggcaaacaattccaaatataactttctttcaatgaatacaaaatgttgatatcacaggtaatgtacaatttagctttgaatgaggtattatgttgtctcactgatgctctctctactttggaagggccaaactaaatgaacacctaagatctatcttagataatcagaacacattaattgttttactgttgggatatttcacattaacaaagagatatcattcttgtgtaaatgctaactattaactaaaatgcattcatatcacctcttcacctgctaaaaagcttttctattgattatatttatccacactccactttgaataaatttacacgtagactttttcatttgtgtaatcagattttaaatctttaaaataatactcaataaaaatcttactttaatgagcctaaggtaaatcttttatgaataattttattggttttaactttatgtataataaactgcacctatttcaagtgtt

SEQ ID NO: 27 - DNA, 1648 bp, Bovine
aggtgtgttccttattccctacatcctgatcgccctgattggaggaatccccatcttcttcttggagatctcgctgggccagttcatgaaggccggcagcatcaacgtctggaatatctgccccctgttcaaaggcctgggctacgcctccatggtgatcgtcttctactgcaacacctattacatcatggtgctggcctggggcttctattatctggtgaagtccttcaccaccacgctgccctgggccacgtgtggccacacgtggaacactcccgattgcgtggagatcttccgccacgaagactgtgccaatgccaccatggccaacctcacatgtgaccagcttgctgaccgccggtccccggtcatcgagttctgggagaacaaagtcttgcggctctctgaagggctggaggtgccaggggccctcaactgggaggtgaccctgtgtctgctgacctgctgggtgctggtctacttctgtgtctggaagggggtcaagtcaacaggcaagatcgtgtatttcaccgctacattcccctatgtggtcctcgttgtgctgctggtgcgcggagtgctgctacctggcgctttggatggcatcatctactatctcaagcctgactggtcaaagctggcatcccctcaggtatggatcgacgcagggacacagatcttcttctcttacgccatcggcttgggggccctcaccgccctgggcagctacaatcgcttcaacaacaactgctacaaggatgccatcatactcgccctcatcaacagcgggaccagcttctttgcaggcttcgtggtgttctccatcctgggcttcatggccacagaacagggcgtgcacatctccaaggtagcagaatcagggcctggcctggctttcatcgcctatccgcgggccgtcacgctgatgcccgtggccccactctgggcagctctgttcttcttcatgctgttgctgcttggtctggacagccagtttgtaggtgtcgaaggcttcatcactggcttgctggacctcctcccagcctcctactacttccgattccaaagggagatctccgtggccctctgttgcaccatctgctttgtcatcgacctctccatggtgactgatggcgggatgtatgtcttccagctgtttgactactactcagccagtggcaccacactgctctggcaggccttctgggagtgtgtggtggtcgcctgggtgtacggagctgatcgcttcatggatgatgtggcctgcatgatcgggtaccgaccttgcccctggatgaaatggtgctggtctttcttcaccccactggtgtgcatgggcatcttcatcttcaatgtggtctaccatgagccgctggtctacaacaatacctacgtgtacccgtggtggggcgaggccgtgggctgggcctttgcgctctcctccatgctatgtgtgcccctccacctcctgggctgcctcctcagggccaaggggaccatggctgagcgctggcagcacctgacgcagcccatctggggcctccaccacctggaatacagagctcaagactcggatgtcaggggcctgaccaccctgaccccagtgtctgagagcagcaaggtggtggtggtggaaagcgtcatgtga

SEQ ID NO: 28 - DNA, 4515 bp, Bovine
gaagaaatcaaaatggatctgagtgtgagtgtgaattctgtcaccatctctgttgagggaatgacatgtagttcctgtgtttggaccattgaacagcagattggaaaactgaatggtgtacatcatattaaagtttcactggaagaaaaaaatgcaactgttatttatgacccaaaactacaaactccaaagaccctgcaggaagctattgatgacatgggctttgatgctattctccacaatcctaagcctctccctgttttaactgaaactgtgtttctgactgttactgcttcactggttccgccatgggaccatatccaaagcacattgctcaagaccaagggtgtgacagatattaaaatttcccctcagcagagaactgcagtggtgacaataatcccttctatagtgaatgccaatcagatagtagagctggttcctgatctcagtttagatactggaactctggaaaaaaagtcaggaacttgcgaagattatagtatggctcaaccaggtgaagtcatgctgaagatgaaggtggaagggatgacctgccattcatgtactagcaccattgaaggaaaaattgggaaactgcaaggtgttcagcgaattaaagtttccttggacaatcaagaagctactgttgtttatcaaccccatcttatcacagcagaggaaataaaaaagcagattgaagttgtgggctttacagcattcatcaaaaaacagcccaagtacctcaaattgggagctattgacatagaacgtctaaagaacacaccagtcaaatcctcagaaggatcacagcaaaagagtccatcatacaccagtaattcaacagtcattttcaccatagatggcatgcattgtaaatcatgtgtgtcaaatattgaaagtgctttatctacactccaacatataagcagtgtagtagtttctttagagaataaatctgccatagtaaagtacaatgcaagtttagtcactccagaaacactgagaaaagcaatagaggccatatcacaagggcaatatagagttagtagtgcaagtgaaattgagagtacctcaaactctccctccagctcatctcttcaaaagagtcctttgaacatagttagccagcctctaactcaagaaactgtgataaacattgatggcatgacttgtaattcgtgtgtgcagtctattgaaggtgtcatatcaaaaaaggcaggtgtaaaatccatacaagtatcacttgcaaatggcaaagggactgttgagtatgatcctttactaacctctccagaaaccttgagagaagcaatagaaaacatgggatttgatgcttccttgtcagatacaaatgagccattggtagtaatagctcagccctcatcagaaatgccacttttgacctcaactaatgaatttcacaccaaaatgatgacaccaattcatgacaaggaggagccaaagacttcatccaagtgttatatacaggtcactggtatgacttgtgcttcctgtgtagcaaacattgaacggaatttaagacgagaagaaggaatatattccatacttgtggctctgatggctggcaaggcagaagtaaggtataaccctgctctcatacaacccccagtgatagccgagttaatccgagagcttggatttggatccactgtgatagaaaatgctgatgaaggagatggtgttttggaacttgttgtgagaggaatgacatgtgcctcctgtgtccataaaatagagtctaccctcacaaaacacagagggatcttctactgctctgtggccctggcaaccaacaaagcacatattaaatatgatccagaaattattggtcccagagatattattcatacaattgaaagcttgggttttgaagcttctttggtcaagaaggaccggtcagcaagccacctagaccataaacgggaaataagacagtggcgacgggcctttcttgtgagcctatttttctgtatacctgtaatgggactgatgatatatatgatggttatggaccaccatcttgcaagtcttcaacataatcagaacatgagccaagaagaaatgatcaacattcattcttctatgttcctggagcgccagatcctgccaggattgtccattatgaatttgctatcttttttattgtgtgttcctgtacagttttttggaggctggcacttctatattcaggcctacaaagcactgaagcataaaactgcaaatatggatgtattgattgtgctggcaacaaccattgcatttgcttactctttggttattcttctggttgcaatgtatgagagagccaaagtgaaccctgttactttctttgacacacctcctatgctatttgtgtttattgcactaggccggtggctggaacatgtagcaaagggcaaaacatcagaggctcttgccaaactaatttcactacaagctacagaagcaactattgtaactcttgactctgataatatcctcttgagtgaagagcaagtggatgtggaacttgtacaacgtggagacattattaaagtggttccaggaggcaaatttccagtggatgggcgtgttattgaaggacattctatggtagatgagtccctcatcacaggagaggcaatgcctgtggccaagaaatctggaagcacagtgattgctggttccattaaccagaatgggtcactccttatccgtgcaacccatgttggagcagacacaaccctttctcaaattgtcaaacttgtagaggaggcacaaacatcaaaggctcctatccagcagtttgcagacaaactcagtggctactttgttccttttattgttattgtttccattgctacccttttggtttggattataattggatttctgaattttgaaatcgtggaaacctactttcccggctacaacagaagtatctcccgaacagaaacaataatacgctttgctttccaagcctctatcacagttctatgcattgcatgcccctgttccctgggactggccactccaactgctgtgatggtgggtacaggagtaggtgctcaaaatggcatactaatcaaaggtggtgagccattggagatggctcataaggtaaaggtagtggtatttgataaaactggaaccattacccatggaaccccagtagtgaatcaagtaaaggttctagtggaaagtaatagaatatcacgcaataagatcctggctattgtgggaactgctgaaagtaacagtgaacaccctctgggagcagccataacgaaatactgcaagcaggagctggatactgaaaccttgggtacctgcatagatttccaggttgtgccaggctgtggcattaactgtaaagtcaccaatatcgaagccttgctacacaagaataactggaagatagaggaaaataatattaaaaatgcatccctggttcaaatagatgagagtaatgaacagtcatcaacttcgtcttccatgattattgatgctcagttctcaaatgctcttaatgctcagcagtacaaagttctcattggcaaccgggagtggatgattagaaatggtcttgccattaataacagtgtaaatgattccatgactgaacatgagagaagaggtcggactgctgtactggtagcagttgatgatgagctgtgcggtttgatagctattgctgatacagtgaagcctgaagcagaactggctgtccatattctgaaatctatgggcttagaagtagttctgatgactggagacaacagtaaaacagctagatctattgcttctcaggttggcattactaaagtgtttgctgaagttctaccttcccacaaggttgctaaggtgaagcaacttcaagaggaggggaaacgggtagcaatggtaggagatggaatcaatgactccccagctctggcgatggctaatgttggaattgctattggcacaggcacagatgtagccattgaagcagctgatgtggttttaataaggaatgatcttctggatgtagtggcaagtattgatttatcaaggaagacagtcaagaggattcggataaattttgtctttgctctaatttataatctgattggaattcctatagctgctggagtttttatgcccattggtttggttttgcaaccctggatgggatctgctgcaatggctgcttcatctgtttcagtagtactttcttcactcttccttaaactttacaggaaaccaacttatgagaattatgaactacatgctcgaaaccaaatgggacagaaaagtccttcagaaataagtgttcatgttggaatagatgatacctcaagaaattctcctaaactgggtttgctggaccgaattgttaattacagcagagcctccataaattcactactgtctgataaacgatcactaaacagcgttggtaccagtgaacctgacaagcactcactcctggtcggagactgcagggaagatgacgacagtgcgttgtaa

SEQ ID NO: 29 - DNA, 1338 bp, Bovine
atgaaattcccgggctcggtgctggcgtccgtgttcctgttcgtggccgagacgtcggcggcgttgtacaatatggtgattcacaattttaaaggtaatgccccatttatagttattacaaaattatttatgctgacaccaacatgcatggtttcaggcacactcattaagctggtaaaccatgaaccatctagggggaggggtttatgtaatttggagcatctattggatctaaagtttgtttccaggtgttttgaagtcttctgcatctattgtcagtcaaaccacattgaagaaccttatgtcagcatcaccaagaagcggcagataccaaaaaatggccactcagaggaaattgagaaggaagtgggccaggcagagggcaagctattcacccaccgatctgcattcagccgggcatcggtgatccaggctttcctgggctcagccccacagctgaccctgcagctgtacataagtgtcttgcagcaggatgtcagtatcggacgatgtctgttcatggtcctttccctattgtccattgtgtacggagccttgcgctgtaacatcctagccatcaagatcaaatacgatgaatatgatgtcaaggtgaagcccctggcctatgtctgtatcttcctctggaggagctttgagattgtcacccgagtcattgtcctggtcctctttacctctgtcctgaaggcctgggtggtcatagacatactcatcaacttcctcggcttcctcttctacccctggatcctcttctggtgcagtggctcccccttccctgagaactttgagaaggccttcagtcggctgggcaccaccattgtgctgtgcttcctcaccctcctctacgccgggatcaacatgttctgctggtcggcggtgcagctgaaaatcaacaaccccgacctcatcagcaagtctcagaactggtaccggctcctggtgtactacatggtgaggttcatcgagaacgccttcctcctcctcatgtggtatctttacaagactgacatctatatgtatgtgtgtgcacccctgctgatgctgcagttgctcattgggtactgcacggccattctgttcatggttgtgttctatcagttcttccacccttgcaaaaagctcttttcccccaatgcttctgaaagctttcaggagtggctaaagtgtgcctgttgtaaccgcaggcggcgggaatcctgcgagtctgcagaaaatacagacctaaggtcacccacagacagagaggagaccccttctagcagtaaaataagttccatgcctagccagatcttgaatactgatgagctctcttctgcttaa

SEQ ID NO: 30 - DNA, 4297 bp, Bovine
atggccgtggcgctgtggttcttgtggcctctcctcctctgcagcccttgcgtgctcatccagatccctgaggaatatgaaggacaccatgtgatggaaccccccatcatcacggagcagtctccccggcgtgtggtcgtcttccccacagatgacgtcagcctcaagtgtgaggccagcggcaaacccgaagtgcagtttcgctggactcgggatggcatcctcttcaaacccagagaggaactgggcatgatcgtgaaccaggtgccccattctggctccttcagcatcacgggcaacagcagcaactttgcccagagcttccagggcacctatcgctgctttgccagcaacaagctgggcaccgccatgtcccacgagatccagctcatggccgagggtacccccaagtggccaaaggagacagtgaaacctgttgaggtcgaggaaggggagtcggtgattctcccttgccacccgccccccagtgcagagccactccggatctactggatgaacagcaagatcttgcacatcaaacaggatgagcgggtgaccatgggccagaatggcaacctctactttgctaatgtgctcacctcagacaaccactcagactacatctgtcacgcccacttccctggcacccgaaccatcattcaaaaggaacccattgacctccgggtcaaagcgaccaacagcatgatggacagaaaaccacacttgctcttccccaccaattccagcagccacctggtggccctgcaggggcagcccttgatcttggagtgcatagctgagggcttccccacgcccaccatcaagtggctgcgcccaagcggccccatgccagccgaccgggtcacctaccagaaccacaacaagacgctgcagttgctgaacgtgggtgaggaggacgacggcgagtaccgctgcctggctgagaactcgctgggcagcgaccgccacgcctactacgtcaccgtggaggctgcaccatactggctacacaagccccagagccatctgtacgggccaggggagactgcccgcctagactgtcaagtgcagggcaggccccaaccggaggtcacctggagaatcaatgggatccctgtggaggagctgggcaaggaccagaaataccggatccaccatggagccctggtcctgagcaatctgcagcccagtgacactatggtgacccagtgtgaggcccgcaaccgccacgggctcctgctggccaatgcctacatctatgttgtggagctgccagccaagatcctgaccccagacaatgagacatacatggcagtccagggcagcaccgcctaccttctgtgcaaggccttcggagcccctgtgcccagcgtccagtggctggacagggaaggaaagacagtgctgcaggacgagcgcttcttcccctacaccaacgggaccctgggcatccgagacctccagaccaatgacactgggcactacttctgccaggctgccaacgaccaaagcaacgtgaccattgtggctaacctgcaggtcaaagatgccactcggatcatgcaggggccccgcagtgcaatcgagaagagaggctcccgagtgatgttcacatgccaggcctcctttgacccctccctgcagcacagcaccacctggcgcagggatgctctcgacctgcaggagttgggggacagtgacaagtacttcatagaagacgagcgcttggtcatccacagcctggactacagtgaccagggcaactacagctgcgtggccagcaccaagctggacgtggtggagagccgggcagagctgctggtggtcgggagccccggacctgtgccccagctggagctgtctgatcaccacctgctgaagcagagccaggtgcgcctgtcttggagcccagctgatgaccataacgcccccattgagaagtatgacattgaatttgaggacaaggagatggcacccgagaagtggtacagcctgggcaaggtgcccggaaaccagacctccaccaccctcaagctgtcgccttatgtccactatacctttcgagtcactgccatcaacaaatatggccctggggagcccagcccggactctgagactgtggtcacgccggaggcagccccagagaagaaccccgtggacgtgaagggggaaggaaatgagaccaacaacatggtcatcacttggaagccgctgcggtggatggactggaatgccccccaggttcagtatcgagtgcagtggcgcccccagaagatgcagggggcctggcaggaacagatcgtcagtgaccccttcctggtggtgtccaatacatctacctttgtgccgtatgagatcaaagtccagaccgtcaacagccagggcaagggccctgagccccagatcaccatcggctactctggagaggactacccccaggcaagccctctgctggaacccgtcaaggccctcaattcaagcactgtgctggtcaggtggcagtctgtggacccagcccaggtcaaaggccacctccggggatacaatgtgacgtactggtgggaaggcagtcagaggaagcacaacaagaggcacgtccacaaaggccacgtggtggtgccagccaatgccaccagcaccatcctgggaggcctgcggccctatagctcctactgggtagaggttcaggcctttaacgggaggggactggggcctgccagtgggatgaccttcaacacccctgagggagtgcctggacaccctgaggcgttgcacctggagtgccagtcagataccagcctgctgctgcactggcagcctccgctcagccataatggtgtgctcacgggctacgtgctctcctaccaacctttgaatgacgggagcaaggagcagttgtcctttgacctcccggaccctgagctgcggacacacaacctgaccaacctcagcccccgcctgcggtaccgattccagctgcaggccaccacgagggagggcccgggggaggcgatcgtacgggaaggaggcaccatggccttgtccgggatgccggactttggcaacatctccgccatggctggcgagaattacagtgtggtctcctgggtccccaaagagggccagtgcaacttcgggttccagatctggttcaaagccctgggggacgagaagctggtggctcgtctcccaccgcagtacgtcagctacaaccagagctcctacacacagtgggacctgcagcctgacaccgactatgagatccagctgctcaaggagcaggtgctcctgcaccagatggcagtgaagaccaacggcaccggccgagtgaggctgcctcccgctggctttgccactgagggctggttcatcggcttcatcagtgccatcgttgtcctgcttcttgtcttactcatcctgtgcttcattaagcgcagcaagggtggcaagtactcggtgaaggacaaggaggacacccaggtggactcagaggcccggcccatgaaggacgaaaccttcggcgagtacaggtccctggagagtgacaatgaggagaaggcctttggtagcagccagccatcactcaacggagacatcaagcccctgggcagcgatgacagcctggcggactacggaggcagcgtggacgtccagttcaatgaggatggctccttcatcggccagtacagtggcaagaaggagaaggaggtggcagggggcaatgacagctccggggccacatcccccatcaaccccgccgggaccctggagtagcggggtccagccaggccaggcagagcaccacccagggccaggccacggggctatcagagatcaccatgatggcccagcccaaggcctgtgctgggtccctgaccctgggactgaggcccgtccttctctccagtgagttcgggggccgaggaggggatctcgctgcctcaacgccctcttctgactccccagtccccacttgattgccaaaacccagctgctctgcttcttgggcacacactgctttttcactccagctcgggggccactcacatgccaggagtcttcaggtgctgcctcaccagcctttgggcagggcgaggctgtggttgaggcgaggaggcaggcacagctgtggagggggtctcctaaggaccagggttggcacctccagccccagccactcgttggccagtaggactgggacaggggactgaagtcggtgtccctgctgtctgccccatcttctcagccatctctgctccaactgggatgggaactgaacaagctggccacgggtaca

SEQ ID NO: 31 - DNA, 1101 bp, Bovine
atggtccctgagatgagtgaacgccaagagttccaagcctccgattttgcctacctcctggaaaactcttcctatgactacggagaaaatgagacctacttctgctgtacttccccaccctgcccacaggacttcagcctcaacttcgaccgcaccttcctgcccgtcctctacagcctcctctttgtgctggggcttctgggtaatggcatcgtggcagtcgtgctgctgagccagagggcggccctgagcagcaccgacacctttctgctgcacttggctgtggccgatgcactgctggtgctgacactccctctctgggcagtggatgcagccatccagtgggtctttggctctggcctctgcaaagtggcgggtgcactcttcaacatcaacttctacgcaggggccctcctgctggcctgtatcagcttcgatcggtacctgagcattgtgcacgccacccagctctaccgccggggccccccgactcgcgtggccctcacctgtgtggcagtctgggggctctgtctgctctttgcgctcccagacttcatcttcctgtcctcccaccatgacaaccgcctcaatgccacccactgccagtacaacttcccacaggagggccacacagctctgcgcatcctgcagctggtggcaggcttcctgctgcccctgctggtcatggcctattgctatgcccgcatcctggctgtgctgctggtctccaggggccagcggcggctcagagccatgcggctggtggtggtggtggtggtggcctttgccctctgctggaccccctaccacctggtggtgctggtggacaccctcatggacctgggggccttagcccgtaactgcggcagagaaagcagtgtggacatagccaagtcggtcacgtcgggcatgggctacatgcactgctgcctcaacccactgctctatgcctttgtgggtgtcaagttccgagagcggatgtgggtgctactcgtgcgtctgggctgccctgaccagaggtgccaccagcggcagccatcagcttcccgccgggaatcatcctggtctgagaccacagaggcctcctactcaggcctgtga

SEQ ID NO: 32 - DNA, 2406 bp, Bovine
gaaaaactgatctgttttcctctttctcttggtcagtgtgctggagaagagaagcgagttggtacgcgcacagtatttgttggcaatcatccagtttcagaaactgaagcatacattgcacaaaaattttgtgataatagaataatctcatctaagtatacactttggaatttcctcccaaagaatctgtttgaacagtttagaagaattgcaaatttttattttcttataatttttcttatacaggtaacagtagacacaccaactagcccaattaccagtggacttccacttttcttcgttataactgttacagccatcaagcagggatatgaggattggctgaggcacagggccgacaatgaagtcaataaaagcactgtttacattattgaaaatgcaaagcgagtgaaaaaagagagtgaaaaaatcaaggtcggtgatatagtagaagtacaggcagatgaaacctttccctgtgatcttattcttctgtcatcctgcacagttgatggaacctgttatgttaccacagccagtcttgatggggaatcgaattgcaagacacattatgcggtacgtgataccattgaactgcgtacagtcgaatccattgataacctcagagcagcaattgaatgtgaacagcctcaacctgacctctacaagtttgttggccgaatcaatatctatagtaatagtattgaagctgttgccaggtctttgggacctgaaaatctcttgttgaaaggagctacactaaaaaataccaagaagatatatggagttgctgtttacactggaatggaaaccaaaatggcattgaactaccaagggaaatctcagaaacgttctgctgttgaaaaatccattaatgctttcctgattgtgtatttatttatcttactgaccaaagctgcaatatgcactactctaaagtatgtttggcaaagtaccccacataatgatgaaccttggtataaccaaaagacccagaaagaacgggaaacttggaaggttttaaaaatgttcactgacttcctgtcatttatggttctgttcaactttatcattcctgtctccatgtatgtcacagtagaaatgcaaaaattcttgggctccttcttcatttcatgggataacgacttctatgatgaagaaattaatgaaggagccctggtaaacacatcagaccttaatgaagaacttggtcaggtggattatgtatttactgataagactggaacacttactgaaaacaccatggaattcattgaatgctgcatagatgggcataagtataaaggtgtagctcaggagactgatggactctctcaaactgatggacccttaccatatttggacagagctgataagaatcgagaagagctctttctgcgtgccttgtgtttatgtcacactgtagaagttaaaccaaatgatactgttgatggagttacagagtcatctgaattaacctatatgtcatcttcaccagatgaaatagaaagtgaaatcacaggaggacagaggtatggattcacatttgtaggtgttcagaatggctatatgagagtagagaaccaaagaaaagaaatagaagagtatgaacttcttcacaccttaaactttgatgctgtccgccgtcgtatgagtgtaattgtgaagactcaaacaggagatatacttctcttttgtaaaggagccgactcagcagttttccccagggtacaaaatcatgaaatcgacttaattaaagtccatgtggaacataatgcgatggaggggtatcggacactttgtatagccttcaaagaaattgctccagatgattatgaaagagttaacagacagctcatagaggcaaaaatggccttacaagacagagaagaaaaaatggaaaaggttttcgatgagattgagacagacatgcatttaattggagccactgcagtggaagacaagctacaagatcaagccgctgagaccattgaagccctgcatgccgcaggtctgaaagtctgggtgcttactggcgacaagatggagactgcaaaatccacctgctatgcctgccgccttttccaaaccaacaccgagctcttggaactgaccaccaagacaattgaagaaagcgaaaggaaagaggatcgattacatgagttgttgactgaatatcgtaagaagctgctgcatgaatttcctaaaagtactagaagccttaaaaaagcgtggacagaacatcaggaatacggattaatcattgatggctccactctgtctcttatattaaactctagtcaagactctggttctaacaattacaaaagcattttcctacagatctgcatgaagtgcacagcagtgctctgctgtcggatggccccgttacagaaagctcaggta

SEQ ID NO: 33 - DNA, 1020 bp, Bovine
tcagatgtctttgggaacgaattcagtatattaagatcaccagggtctgttgttttccggaatggaaattggcctattccaggagagcgaatcccagacgtggctgcattgtccatgggcttctctgtgaaagaggatctttcttggccgggccttgcagtaggtaacctattccaccgtcctcgggctactgttatggtgatggtgaaaggagtggacaagcttgctctacccccaggcagtgtcatttcgtaccctttggagaatgcagttccttttagtcttgacagcgtggcaaattccattcactccttattttctgaagaaactcctgtggttttgcagttggctcccagtgaggaaagagtgtacatggtggggaaggcaaactcagtttttgaagatctctcagtaacgctcagacagctccgcaatcgactgtttcaagaaaactctgttctcacttcacttcccctcaattctctgagtaggaacaatgaagttgatctcctttttctttctgaactgcaagtgctacgtgatatttcaagtttgttgtctcgacataagcatctagccaaggatcattctcctgatttatactcactggagctagcaggcctggatgaaattgggaaacactatggggaagactctgaacaatttagagatgcctctaagatccttattgatgctctgcaaaagtttgcagatgacatgtacaatctctatggtgggaatgcagtggtagagttagtgactgtcagatcattcgacacatcccttgtgaggaagacgaggaatatccttgagacaaaacaagtgaaggacccctcaactacctataaccttgcatataaatataattttgaatatcccgtggttttcaacctggtactttggataatgatcggcttggccttgactctgattgtcacctgttacaatatttggaacatggatcctggatatgatagcatcatttataggatgacaaaccagaagattcgaatggattga

SEQ ID NO: 34 - DNA, 1857 bp, Bovine
agtagctcgcggagagggaggagaaagcaagttccggatccctgcctatcccggcccaacctttgctccagcgatcatggctgccgaggatgtggcggcgaccggcgcagacacgagcgagctcgagagcggcgggctgctgcaagagattttcacgtcgccgctcaacctgctgctccttggcctttgcatctttctgctctacaagatcgtgcgcggggaccagccggcggccagcgatagcgacgacgacgagccgcccccgctgccccgccttaagcggcgcgacttcacccctgccgagctgcggcgcttcgacggcgtacaggacccgcgtatactcatggccatcaatggcaaggtgttcgacgtaaccaaaggccgcaagttctacgggcctgaggggccgtatggagtctttgctggaagagatgcatccagaggccttgccaccttttgcctggataaggaagcgctgaaggatgagtacgatgacctttccgacctcactcctgcccagcaggagaccctgagtgactgggactctcagttcactttcaagtaccatcatgtgggcaaactgctgaaggacggggaggagcccaccgtgtactcagacgaggaggagccaaaagatgagagcactcggaagaatgattaaggccttcagcggaagcatatctatttttgtattttgcagaatcatttgtaacattccagtctgtctttaaaacatggtgatttcaatatttagaaaagttttgaacttgctgtacatttttttaattaacatcactagtgacactgataaagctaactctgtcttagaatgcatgatatgtttgtgtgtcacaaatccagaaagtgaagtgcagtgctgtaagacaaatgttattatggtttttcttctatttgtagtcagtgcaggctgaattggaacttgtatttcctgagagacaggtaagacatgagtattccccccaaacaggtttaaaggttaaatgtgtgaagtccttcaagcgtcaagaaacaaagaatggactttgagtcatgatattctctaaagatagaaaatcctttatttctcgattgacctaactgcatgatttctgttttctctacctctaaagcaaatctgcagtgtcccaaaggctttggtattaattaaagagagcagtccagtacaaaatgaaatctcaaagctggactcaatcacaggtaacctacttttctgtttggggacagcatcattgtcctgtgctctttggaacactcagatgcccttacttaacagtaatctccaatgagcctgaaaataggatctcaacattccaaagcaagctttggcgaaaatcagctggcttgcctaaaaaccaaaaatacatgaataagattgtaggactattttccccacccctgtgttcttggttatttcacatgattggacatgcgaggggaccgtgtaggacaggagcagattgttctctaagagccttcacacacacccctgaagaatgaggaaaccgtacacattactggccaagtggtttttaaagtgtattcataacctaacagttattcttctgttgttacaaaactatagccactgcaagagttgtagtcaagtgtcttggtctttgatattggtcttggttaacaataaacttagcttaagtagactgtacagttgtatgactttgtaaaagtattatatgaataactagtgaggtttcaaactcttgtaattgtagttgaatagtcattgtattttcttgtgaactgtgtttaatggttttacctcaaatcagaaaacaaaatgaagtgctttggtcagttaataaaatggttttacccagt

SEQ ID NO: 35 - DNA, 642 bp, Bovine
tacacatctaccatgtccttgctcatcaacagcgccaattgccaaatagtaggttttgcagtagccactattggatggatcctcggcaccactgccatgggcttcgtggagtggcgagtatggtatctagacaacgcctcacaattctctggtctggcctgcatgggaatgtggagagtctgtgtcttccgtcaaaccaacatcaccacagctacctcatgtcacagttacagctaccatgatacttacctacctcttgatatccgtgtttctcaacacctcttactgatggccagcattctaggactcttggggaaagcctctgttacttttgcacttaaaaatgtgtccatgggaattcttgagaatactactacctacaaagcatttgtcatttcaggaattctccacatagctgctggtatctgtatctcagttgctgtcatctggaattaccactctgtgatgactgaagagggcattgtcttcccaccatctttcaatatacccttcaagccatatgctcagaaaattggcaacactgttatagtggcatgtctagctgcctttgcgctgttcttaggtgggtggttttttctctcttacaaattacccctggataaccaggtgcatcctgaagta

SEQ ID NO: 36 - DNA, 1077 bp, Bovine
atggcgacctcagctgatgggattgaaactgtgggtgaagttgctgggaccacaccctacgactatgaggcggcactgccgtgcgagaagagcaacgtcaaggagctggcggcccagttcctgcccccgctgtactccctggtgtttgtgaccggcctgctgggcaacgtggtggtggtggtgatactcacaaagtacaagcggctccggatcatgaccaacatctacctgctcaacctggccatttctgacgtgctcttcctattcacgctgccattctggattcactatgttaggtggaacgagtgggtgtttggccaccgcatgtgtaagttgctctccgggctctattacatgggcttgtacagtgagatctttttcatcatcctcttgaccatagaccggtatcttgccatcgtccacgccgtgtttgcccttcgagcccggacagtcacttttggtattgttaccagcatcttcacctgggtcctggcagggctagcagccctccctgaatttttctttcatgagacccaagaggaggctggacagactttctgcagtcctctttacccagaggataatgaaaatgcctggaagcgattccatgctctgagaatgaatatcctgggtctcgctctgcctctgcttgttatggccatctgctattcaggaattattaaaacactgctgagatgccccagtaaaaaaaaatacaaagccattcgacttatttttgtaattatggtggtcttctttattttctggacaccctacaatctggttgtcctactctttgcttttcaaatgcacttgaaggctgattgtgaacagagcagacagctggacctggccatgctggtgacagaggtgatcgcctacacgcactgctgtgtcaaccccgtgatctatgccttcgttggtgagaggttccggaagcacctccgccactttttccacagatatatggccacctacctgggaaaattcatgccatttcttcctagtgaaaaactggaaagaaccagctctgtctccccatcaacaggggagcaggaactctctgctgtattttag

SEQ ID NO: 37 - DNA, 1083 bp, Bovine
ctcaccatgcacaccaccctccctgaatcaacttcagaaaacttcgagtattatgaccttgcagaagcctgtgatatgggggacatcgtggccttgggaactgtcttcgtggtcatactctactccctcgtctttgcctttggcctggtgggaaatttgctggtggtgtttgccctcatcaacagccagaggtccaaaagtattactgacatttacctcctgaacctggccttgtctgatctgctctttgtagccaccttgcccttctggactcactatgtgataaatgagcaaggccttcaccacgccacgtgcaaactcatcactgccttcttcttcattggattttttggaggcatattcttcatcaccgttatcagcgtcgacaggttcctggccattgtgctggctgccaactccatgagcaacaggaccgtgcagcatggtgtcaccaccagcctcggcgtctgggcagctgccatcttggtggccacaccgcagttcatgttcaccagagagaaagagaacgaatgctttggcgactaccctgagatcctgcaggaaatctggcctgtgatcctcaacacggaaataaattttcttggcttcctgctccccctgctcattatgagttactgttacttcagaatcatgcagacattgttttcctgcaagaaccacaagaaagctaaagccatcaggctgatctttctggtggtcgtcgtttttttcctcttctggacaccctataatgtcatgattttcttacagacactcaatctctatgacttctttcccaaatgtgatgtgaagagagatctgaagttggccatcagtgtgacagagacaattgcatttagccactgttgcctcaatccccttatctatgcatttgctggagagaagttcagacgatacctttaccgtctgtacaggaaatgcctggctgtcctgtgttgccatcctgaccacctcagtttctcttcatctctgtctgaatcacaaaggagcaggcgggaaagtgttctgagcagcaattttactcattacaccagcgatggagatgcgtccatccttctctga

SEQ ID NO: 38 - DNA, 459 bp, Bovine
atgtggtccctcaaatcgttcttgtgcttatccattgttgtttcctgtgtctacgccttaatgtttacttctctgacagagaaagttaaagaaatccagtggaaggtgctctgcagaggacactttttaattcagcagaatctacaagagcaagcccaagactggcttgagatcacgttgctctggcttttcttcattgtgctgatgtacgtgacagtgaagttggcaggagagaatggcgagagtagagtgcagacttctcatgcccttcagggccgttcatttggctttcttggaaataaaaaggtaaagacttcctctaaagaagtctacatgttccataccttaaccctgctcgagatggaccttgtgaaatttgtgtgcagggtgcagaatctgaaactcgccacatcaaccagcggtaacatcaaccccctcaatgtcaaggttcctgcagat

SEQ ID NO: 39 - DNA, 1041 bp, Bovine
atggcccgtcctggccagcgttggctcggcaagtggcttgtcgcgatggtcgtgttggcgctatgccggctcgccacgccgctggccaagaatctggagcccgtgtcctggagctctctcaaccccaagttcctgagtgggaaggggctggtgatttacccaaagattggagacaagctggacatcatctgcccccgagcagaagctgggcggccctatgagtactacaagctgtatctggtgcggcctgagcaggcagcggcctgtagcactgtgcttgaccccaatgtgctagtcacatgcaataggccagagcaggaaatccgcttcaccatcaagttccaggaattcagccccaactacatgggcctggagttcaagaagcaccatgattactatattacctctacatccaatgggagtctggagggactggagaaccgggagggaggtgtgtgccgcacacgcaccatgaagatcgtcatgaaggttgggcaagaccccaatgctgtgacacccgagcagctgactaccagccggcccagcaaggaggcagacaacactatcaagatggccacacaggcccctggtggtcggagttccatgggtgactctgacggcaagcatgagactgtgaaccaggatgagaaaagtggctctggtgggaatggaggcagtagcggggaccccgacagcttcttcaactccaaggtggcgttgtttgcagctgtgggcgctggctgcgtcatcttcctactcatcatcatcttcctgaccatcctgctactgaagctgcgcaagcggcaccgcaagcacacacagcagcgggcgcccgccctctcactcagcaccctggccagtcccaaggggggcagtggcactgcgggcaccgagcccagcgacatcatcatccccttacggactacagagaacaactactgcccccactatgagaaggtgagtggggactacgggcaccccgtctacatcgtccaggagatgccgccccagagcccagcgaacatctactacaaggtctga

SEQ ID NO: 40 - DNA, 898 bp, Bovine
atgagcatcttgctgcccaacatggcggagttcgataccatctcggaactggaggaggaggaggaagaagaagcggcaacgtcgtcgtcgtcgtcgccgtcgtcgtcgtcgtcggtatcagggcctgacgatgacgaggaagatgaggaggaggaggaggaagaaaacgaagaggaggaggaggaagaagaggagcaggtggaggaaacgccgcccccgcctcgggtagtgagcgaagagcatctacggagatatgcccccgaccctgtattggtgcggggcgccggccacatcactgtgtttggcttgagcaacaagtttgatactgaatttccctcagttctaacagggaaggtggccccagaagaatttaagaccagcattggccgtgtgaatgcatgtttgaaaaaggctctcccagtcaatgtgaaatggttgctctgtggttgtctctgctgctgttgcacattgggttgcagcctgtggcctgttatttgtctcaacaaaagaaccagaagatcaattcagaagttgttagaatgggaaaataacagattgtatcacaagcttgctttgcactggaagttgactaaaaggaaatgtgaaactagcaatatgatggagtatgtaatactaatagaattcttaccaaaatatcccatattccgacctgactgaggaattttattcagtcacttctgttttacctgtcatttcctacccttagtgccttgtagatgattttggaatgaagatggtctcctttgctgttttcaatttattctttataatcgtagaatattctcctcacacttcatttgtgttggtttaagaagaaattttgcacatcctttttgttgttgttaaatgaggcttgtattttgcactgtcaattttt

SEQ ID NO: 41 - DNA, 519 bp, Bovine
cagctcacgatgcgctctgtaatatggttatttttttggcctacgcttatctcgtttgtctttgcctatgtgttttatgttctgagagatgaagccgaagaactgccgtggatggtgcccagtggaaggcacttccgcgttcggcagaatcaaccagagtatgccccaggctggtttgggagcaagtggcactggctgttaatcttcctcatgtttttggtgatcctgaagtttcctggaggcgatgacgaaagtaatgcgggcactcctcctggccgtcagggctgttcatctggctctccaggaagaaagaagataagggattccccctacaaagagtctatgtgcggtgccttaacccagtccgagacgtcactgatgaaccttatgtccagggtgaagaatatgaaactcactgcggcaaccggtgatcaatgccaatgtcccaatatcgaggttcctggtgacgcacggaataatgttacaatacttgaggtatgggacaccggagaccctgat

SEQ ID NO: 42 - DNA, 276 bp, Bovine
accatgctgaaatctctttcttgcattttgtttctaaaagcatgcgttccagtggagggtcaggtgctaacgccttgcaagcaggggcaagatcttaacaaggatgaatgtttgaaatacaaatgctgttactcttcaatcgagaccgctacggttagctgttttgcccctctgagagacagtaagttaatccttttacagatgtttgggtttggtgcgatgagcatggtcttcctgggatgtctgcccatgtattgctgctctttttgctggaag

SEQ ID NO: 43 - protein, 387 aa, Human
MVFAFWKVFLILSCLAGQVSVVQVTIPDGFVNVTVGSNVTLICIYTTTVASREQLSIQWSFFHKKEMEPISIYFSQGGQAVAIGQFKDRITGSNDPGNASITISHMQPADSGIYICDVNNPPDFLGQNQGILNVSVLVKPSKPLCSVQGRPETGHTISLSCLSALGTPSPVYYWHKLEGRDIVPVKENFNPTTGILVIGNLTNFEQGYYQCTAINRLGNSSCEIDLTSSHPEVGIIVGALIGSLVGAAIIISVVCFARNKAKAKAKERNSKTIAELEPMTKINPRGESEAMPREDATQLEVTLPSSIHETGPDTIQEPDYEPKPTQEPAPEPAPGSEPMAVPDLDIELELEPETQSELEPEPEPEPESEPGVVVEPLSEDEKGVVKA

SEQ ID NO: 44 - protein, 171 aa, Human
MWTLKSSLVLLLCLTCSYAFMFSSLRQKTSEPQGKVPCGEHFRIRQNLPEHTQGWLGSKWLWLLFAVVPFVILQCQRDSEKNKEQSPPGLRGFPFRTPLKKNQNASLYKDCVFNTLNELEVELLKFVSEVQNLKGAMATGSGSNLKLRRSEMPADPYHVTICKIWGEESSS

SEQ ID NO: 45 - protein, 346 aa, Human
MARPGQRWLGKWLVAMVVWALCRLATPLAKNLEPVSWSSLNPKFLSGKGLVIYPKIGDKLDIICPRAEAGRPYEYYKLYLVRPEQAAACSTVLDPNVLVTCNRPEQEIRFTIKFQEFSPNYMGLEFKKHHDYYITSTSNGSLEGLENREGGVCRTRTMKIIMKVGQDPNAVTPEQLTTSRPSKEADNTVKMATQAPGSRGSLGDSDGKHETVNQEEKSGPGASGGSSGDPDGFFNSKVALFAAVGAGCVIFLLIIIFLTVLLLKLRKRHRKHTQQRAAALSLSTLASPKGGSGTAGTEPSDIIIPLRTTENNYCPHYEKVSGDYGHPVYIVQEMPPQSPANIYYKV

SEQ ID NO: 46 - protein, 1566 aa, Human
PSSASSLGIAVSLGRPVLSRSSSGTVDLLEEVGLQIRDTAFSSTKLLEAISTVSAQVEELAVHEIKMDPSMGVNSVTISVEGMTCNSCVWTIEQQIGKVNGVHHIKVSLEEKNATIIYDPKLQTPKTLQEAIDDMGFDAVIHNPDPLPVLTDTLFLTVTASLTLPWDHIQSTLLKTKGVTDIKIYPQKRTVAVTIIPSIVNANQIKELVPELSLDTGTLEKKSGACEDHSMAQAGEVVLKMKVEGMTCHSCTSTIEGKIGKLQGVQRIKVSLDNQEATIVYQPHLISVEEMKKQIEAMGFPAFVKKQPKYLKLGAIDVERLKNTPVKSSEGSQQRSPSYTNDSTATFIIDGMHCKSCVSNIESTLSALQYVSSIVVSLENRSAIVKYNASSVTPESLRKAIEAVSPGLYRVSITSEVESTSNSPSSSSLQKIPLNVVSQPLTQETVINIDGMTCNSCVQSIEGVISKKPGVKSIRVSLANSNGTVEYDPLLTSPETLRGAIEDMGFDATLSDTNEPLVVIAQPSSEMPLLTSTNEFYTKGMTPVQDKEEGKNSSKCYIQVTGMTCASCVANIERNLRREEGIYSILVALMAGKAEVRYNPAVIQPPMIAEFIRELGFGATVIENADEGDGVLELVVRGMTCASCVHKIESSLTKHRGILYCSVALATNKAHIKYDPEIIGPRDIIHTIESLGFEASLVKKDRSASHLDHKREIRQWRRSFLVSLFFCIPVMGLMIYMMVMDHHFATLHHNQNMSKEEMINLHSSMFLERQILPGLSVMNLLSFLLCVPLEFFGGWYFYIQAYKALKHKTANMDVLIVLATTIAFAYSLIILLVAMYERAKVNPITFFDTPPMLFVFIALGRWLEHIAKGKTSEALAKLISLQATEATIVTLDSDNILLSEEQVDVELVQRGDIIKVVPGGKFPVDGRVIEGHSMVDESLITGEAMPVAKKPGSTVIAGSINQNGSLLICATHVGADTTLSQIVKLVEEAQTSKAPIQQFADKLSGYFVPFIVFVSIATLLVWIVIGFLNFEIVETYFPGYNRSISRTETIIRFAFQASITVLCIACPCSLGLATPTAVMVGTGVGAQNGILIKGGEPLEMAHKVKVVVFDKTGTITHGTPVVNQVKVLTESNRISHHKILAIVGTAESNSEHPLGTAITKYCKQELDTETLGTCIDFQVVPGCGISCKVTNIEGLLHKNNWNIEDNNIKNASLVQIDASNEQSSTSSSMIIDAQISNALNAQQYKVLIGNREWMIRNGLVINNDVNDFMTEHERKGRTAVLVAVDDELCGLIAIADTVKPEAELAIHILKSMGLEVVLMTGDNSKTARSIASQVGITKVFAEVLPSHKVAKVKQLQEEGKRVAMVGDGINDSPALAMANVGIAIGTGTDVAIEAADVVLIRNDLLDVVASIDLSRETVKRIRINFVFALIYNLVGIPIAAGVFMPIGLVLQPWMGSAAMAASSVSVVLSSLFLKLYRKPTYESYELPARSQIGQKSPSEISVHVGIDDTSRNSPKLGLLDRIVNYSRASINSLLSDKRSLNSVVTSEPDKHSLLVGDFREDDDTAL

SEQ ID NO: 47 - protein, 171 aa, Human
MWTLKSSLVLLLCLTCSYAFMFSSLRQKTSEPQGKVQYGEHFRIRQNLPEHTQGWLGSKWLWLLFVVVPFVILQCQRDSEKNKEQSPPGLRGFPFRTPLKKNQNASLYKDCVFNTLNELEVELLKFVSEVQNLKGAMATGSGSNLKLRRSEMPADPYHVTICKIWGEESSS

SEQ ID NO: 48 - protein, 355 aa, Human
MTTSLDTVETFGTTSYYDDVGLLCEKADTRALMAQFVPPLYSLVFTVGLLGNVVVVMILIKYRRLRIMTNIYLLNLAISDLLFLVTLPFWIHYVRGHNWVFGHGMCKLLSGFYHTGLYSEIFFIILLTIDRYLAIVHAVFALRARTVTFGVITSIVTWGLAVLAALPEFIFYETEELFEETLCSALYPEDTVYSWRHFHTLRMTIFCLVLPLLVMAICYTGIIKTLLRCPSKKKYKAIRLIFVIMAVFFIFWTPYNVAILLSSYQSILFGNDCERSKHLDLVMLVTEVIAYSHCCMNPVIYAFVGERFRKYLRHFFHRHLLMHLGRYIPFLPSEKLERTSSVSPSTAEPELSIVF

SEQ ID NO: 49 - protein, 399 aa, Human
MAQRQPHSPNQTLISITNDTESSSSVVSNDNTNKGWSGDNSPGIEALCAIYITYAVIISVGILGNAILIKVFFKTKSMQTVPNIFITSLAFGDLLLLLTCVPVDATHYLAEGWLFGRIGCKVLSFIRLTSVGVSVFTLTILSADRYKAVVKPLERQPSNAILKTCVKAGCVWIVSMIFALPEAIFSNVYTFRDPNKNMTFESCTSYPVSKKLLQEIHSLLCFLVFYIIPLSIISVYYSLIARTLYKSTLNIPTEEQSHARKQIESRKRIARTVLVLVALFALCWLPNHLLYLYHSFTSQTYVDPSAMHFIFTIFSRVLAFSNSCVNPFALYWLSKSFQKHFKAQLFCCKAERPEPPVADTSLTTLAVMGTVPGTGSIQMSEISVTSFTGCSVKQAEDRF

SEQ ID NO: 50 - protein, 171 aa, Human
MWTLKSSLVLLLCLTCSYAFMFSSLRQKTSEPQGKVQYGEHFRIRQNLPEHTQGWLGSKWLWLLFVVVPFVILQCQRDSEKNKEQSPPGLRGGQLHSPLKKKRNASPNKDCAFNTLMELEVELMKFVSKVRNLKRAMATGSGSNLRLRKSEMPADPYHVTICEIWGEESSS

SEQ ID NO: 51 - protein, 217 aa, Human
MAEFDTISELEEEEEEEAATSSSSPSSSSSVSGPDDDEEDEEEEEEEEEEEEEEEEEEEEEAPPPPRVVSEEHLRRYAPDPVLVRGAGHITVFGLSNKFDTEFPSVLTGKVAPEEFKTSIGRVNACLKKALPVNVKWLLCGCLCCCCTLGCSLWPVICLNKRTRRSIQKLIEWENNRLYHKLALHWKLTKRKCETSNMMEYVILIEFLPKYPIFRPD

SEQ ID NO: 52 - protein, 217 aa, Human; identical to SEQ ID NO: 51

SEQ ID NO: 53 - protein, 1422 aa, Human
MDPSMGVNSVTISVEGMTCNSCVWTIEQQIGKVNGVHHIKVSLEEKNATIIYDPKLQTPKTLQEAIDDMGFDAVIHNPDPLPVLTDTLFLTVTASLTLPWDHIQSTLLKTKGVTDIKIYPQKRTVAVTIIPSIVNANQIKELVPELSLDTGTLEKKSGACEDHSMAQAGEVVLKMKVEGMTCHSCTSTIEGKIGKLQGVQRIKVSLDNQEATIVYQPHLISVEEMKKQIEAMGFPAFVKKQPKYLKLGAIDVERLKNTPVKSSEGSQQRSPSYTNDSTATFIIDGMHCKSCVSNIESTLSALQYVSSIVVSLENRSAIVKYNASSVTPESLRKAIEAVSPGLYRVSITSEVESTSNSPSSSSLQKIPLNVVSQPLTQETVINIDGMTCNSCVQSIEGVISKKPGVKSIRVSLANSNGTVEYDPLLTSPETLRGAIEDMGFDATLSDTNEPLVVIAQPSSEMPLLTSTNEFYTKGMTPVQDKEEGKNSSKCYIQVTGMTCASCVANIERNLRREEGIYSILVALMAGKAEVRYNPAVIQPPMIAEFIRELGFGATVIENADEGDGVLELVVRGMTCASCVHKIESSLTKHRGILYCSVALATNKAHIKYDPEIIGPRDIIHTIESLGFEASLVKKDRSASHLDHKREIRQWRRSFLVSLFFCIPVMGLMIYMMVMDHHFATLHHNQNMSKEEMINLHSSMFLERQILPGLSVMNLLSFLLCVPLEGKTSEALAKLISLQATEATIVTLDSDNILLSEEQVDVELVQRGDIIKVVPGGKFPVDGRVIEGHSMVDESLITGEAMPVAKKPGSTVIAGSINQNGSLLICATHVGADTTLSQIVKLVEEAQTSKAPIQQFADKLSGYFVPFIVFVSIATLLVWIVIGFLNFEIVETYFPGYNRSISRTETIIRFAFQASITVLCIACPCSLGLATPTAVMVGTGVGAQNGILIKGGEPLEMAHKVKVVVFDKTGTITHGTPVVNQVKVLTESNRISHHKILAIVGTAESNSEHPLGTAITKYCKQELDTETLGTCIDFQVVPGCGISCKVTNIEGLLHKNNWNIEDNNIKNASLVQIDASNEQSSTSSSMIIDAQISNALNAQQYKVLIGNREWMIRNGLVINNDVNDFMTEHERKGRTAVLVAVDDELCGLIAIADTVKPEAELAIHILKSMGLEVVLMTGDNSKTARSIASQVGITKVFAEVLPSHKVAKVKQLQEEGKRVAMVGDGINDSPALAMANVGIAIGTGTDVAIEAADVVLIRNDLLDVVASIDLSRETVKRIRINFVFALIYNLVGIPIAAGVFMPIGLVLQPWMGSAAMAASSVSVVLSSLFLKLYRKPTYESYELPARSQIGQKSPSEISVHVGIDDTSRNSPKLGLLDRIVNYSRASINSLLSDKRSLNSVVTSEPDKHSLLVGDFREDDDTAL

SEQ ID NO: 54 - protein, 503 aa, Human
MDPSMGVNSVTISVEGMTCNSCVWTIEQQIGKVNGVHHIKVKVVVFDKTGTITHGTPVVNQVKVLTESNRISHHKILAIVGTAESNSEHPLGTAITKYCKQELDTETLGTCIDFQVVPGCGISCKVTNIEGLLHKNNWNIEDNNIKNASLVQIDASNEQSSTSSSMIIDAQISNALNAQQYKVLIGNREWMIRNGLVINNDVNDFMTEHERKGRTAVLVAVDDELCGLIAIADTVKPEAELAIHILKSMGLEVVLMTGDNSKTARSIASQVGITKVFAEVLPSHKVAKVKQLQEEGKRVAMVGDGINDSPALAMANVGIAIGTGTDVAIEAADVVLIRNDLLDVVASIDLSRETVKRIRINFVFALIYNLVGIPIAAGVFMPIGLVLQPWMGSAAMAASSVSVVLSSLFLKLYRKPTYESYELPARSQIGQKSPSEISVHVGIDDTSRNSPKLGLLDRIVNYSRASINSLLSDKRSLNSVVTSEPDKHSLLVGDFREDDDTAL

SEQ ID NO: 55 - protein, 350 aa, Human
MAVFVVLLALVAGVLGNEFSILKSPGSVVFRNGNWPIPGERIPDVAALSMGFSVKEDLSWPGLAVGNLFHRPRATVMVMVKGVNKLALPPGSVISYPLENAVPFSLDSVANSIHSLFSEETPVVLQLAPSEERVYMVGKANSVFEDLSVTLRQLRNRLFQENSVLSSLPLNSLSRNNEVDLLFLSELQVLHDISSLLSRHKHLAKDHSPDLYSLELAGLDEIGKRYGEDSEQFRDASKILVDALQKFADDMYSLYGGNAVVELVTVKSFDTSLIRKTRTILEAKQAKNPASPYNLAYKYNFEYSVVFNMVLWIMIALALAVIITSYNIWNMDPGYDSIIYRMTNQKIRMD

SEQ ID NO: 56 - protein, 444 aa, Human
MKFPASVLASVFLFVAETTAALSLSSTYRSGGDRMWQALTLLFSLLPCALVQLTLLFVHRDLSRDRPLVLLLHLLQLGPLFRCFEVFCIYFQSGNNEEPYVSITKKRQMPKNGLSEEIEKEVGQAEGKLITHRSAFSRASVIQAFLGSAPQLTLQLYISVMQQDVTVGRSLLMTISLLSIVYGALRCNILAIKIKYDEYEVKVKPLAYVCIFLWRSFEIATRVVVLVLFTSVLKTWVVVIILINFFSFFLYPWILFWCSGSPFPENIEKALSRVGTTIVLCFLTLLYTGINMFCWSAVQLKIDSPDLISKSHNWYQLLVYYMIRFIENAILLLLWYLFKTDIYMYVCAPLLVLQLLIGYCTAILFMLVFYQFFHPCKKLFSSSVSEGFQRWLRCFCWACRQQKPCEPIGKEDLQSSRDRDETPSSSKTSPEPGQFLNAEDLCSA

SEQ ID NO: 57 - protein, 214 aa, Human
ATMVWFCNSADCQFSVFALTTIGWILSSTSTGLVEWRIWYMKDTSLYPPGIACVGIFRVCIYRRRTNSTTTKFCYRYSYQDTFLPFEISMAQRFLLTASIFGFFGRAFNMFALRNMSMRMFEEDTYNSFVVSGILNIAAGVFNLIAVLQNYDAVINSQGITFLPSLQMPFKPDVQEVGTAIQVAGIGVLPMLLTGMFSLFYKCPPMLYQIFPTT

SEQ ID NO: 58 - protein, 195 aa, Human
MAAEDVVATGADPSDLESGGLLHEIFTSPLNLLLLGLCIFLLYKIVRGDQPAASGDSDDDEPPPLPRLKRRDFTPAELRRFDGVQDPRILMAINGKVFDVTKGRKFYGPEGPYGVFAGRDASRGLATFCLDKEALKDEYDDLSDLTAAQQETLSDWESQFTFKYHHVGKLLKEGEEPTVYSDEEEPKDESARKND

SEQ ID NO: 59 - protein, 89 aa, Human
QECNEEIKMDPSMGVNSVTISVEGMTCNSCVWTIEQQIGKVNGVHHIKVISLENRSAIVNFYAHWFGFAALDGICSNGCFICFCSTFFS

SEQ ID NO: 60 - protein, 387 aa, Human
MREPLEAFKLADLDFRKSSLASGWRMASGAFTMDQFPESVTENFEYDDLAEACYIGDIVVFGTVFLSIFYSVIFAIGLVGNLLVVFALTNSKKPKSVTDIYLLNLALSDLLFVATLPFWTHYLINEKGLHNAMCKFTTAFFFIGFFGSIFFITVISIDRYLAIVLAANSMNNRTVQHGVTISLGVWAAAILVAAPQFMFTKQKENECLGDYPEVLQEIWPVLRNVETNFLGFLLPLLIMSYCYFRIIQTLFSCKNHKKAKAIKLILLVVIVFFLFWTPYNVMIFLETLKLYDFFPSCDMRKDLRLALSVTETVAFSHCCLNPLIYAFAGEKFRRYLYHLYGKCLAVLCGRSVHVDFSSSESQRSRHGSVLSSNFTYHTSDGDALLLL

SEQ ID NO: 61 - protein, 368 aa, Human
MVLEVSDHQVLNDAEVAALLENFSSSYDYGENESDSCCTSPPCPQDFSLNFDRAFLPALYSLLFLLGLLGNGAVAAVLLSRRTALSSTDTFLLHLAVADTLLVLTLPLWAVDAAVQWVFGSGLCKVAGALFNINFYAGALLLACISFDRYLNIVHATQLYRRGPPARVTLTCLAVWGLCLLFALPDFIFLSAHHDERLNATHCQYNFPQVGRTALRVLQLVAGFLLPLLVMAYCYAHILAVLLVSRGQRRLRAMRLVVVVVVAFALCWTPYHLVVLVDILMDLGALARNCGRESRVDVAKSVTSGLGYMHCCLNPLLYAFVGVKFRERMWMLLLRLGCPNQRGLQRQPSSSRRDSSWSETSEASYSGL

SEQ ID NO: 62 - protein, 267 aa, Human
MVLEVSDHQVLNDAEVAALLENFSSSYDYGENESDSCCTSPPCPQDFSLNFDRAFLPALYSLLFLLGLLGNGAVAAVLLSRRTALSSTDTFLLHLAVADTLLVLTLPLWAVDAAVQWVFGSGLCKVAGALFNINFYAGALLLACISFDRYLNIVHATQLYRRGPPARVTLTCLAVWGLCLLFALPDFIFLSAHHDERLNATHCQYNFPQGSSSGSGCGCCSCAWAAPTREGSRGSHRLPAGIHPGLRPQRPPTRACEAGIRAPLSPT

SEQ ID NO: 63 - protein, 1500 aa, Human
MDPSMGVNSVTISVEGMTCNSCVWTIEQQIGKVNGVHHIKVSLEEKNATIIYDPKLQTPKTLQEAIDDMGFDAVIHNPDPLPVLTDTLFLTVTASLTLPWDHIQSTLLKTKGVTDIKIYPQKRTVAVTIIPSIVNANQIKELVPELSLDTGTLEKKSGACEDHSMAQAGEVVLKMKVEGMTCHSCTSTIEGKIGKLQGVQRIKVSLDNQEATIVYQPHLISVEEMKKQIEAMGFPAFVKKQPKYLKLGAIDVERLKNTPVKSSEGSQQRSPSYTNDSTATFIIDGMHCKSCVSNIESTLSALQYVSSIVVSLENRSAIVKYNASSVTPESLRKAIEAVSPGLYRVSITSEVESTSNSPSSSSLQKIPLNVVSQPLTQETVINIDGMTCNSCVQSIEGVISKKPGVKSIRVSLANSNGTVEYDPLLTSPETLRGAIEDMGFDATLSDTNEPLVVIAQPSSEMPLLTSTNEFYTKGMTPVQDKEEGKNSSKCYIQVTGMTCASCVANIERNLRREEGIYSILVALMAGKAEVRYNPAVIQPPMIAEFIRELGFGATVIENADEGDGVLELVVRGMTCASCVHKIESSLTKHRGILYCSVALATNKAHIKYDPEIIGPRDIIHTIESLGFEASLVKKDRSASHLDHKREIRQWRRSFLVSLFFCIPVMGLMIYMMVMDHHFATLHHNQNMSKEEMINLHSSMFLERQILPGLSVMNLLSFLLCVPVQFFGGWYFYIQAYKALKHKTANMDVLIVLATTIAFAYSLIILLVAMYERAKVNPITFFDTPPMLFVFIALGRWLEHIAKGKTSEALAKLISLQATEATIVTLDSDNILLSEEQVDVELVQRGDIIKVVPGGKFPVDGRVIEGHSMVDESLITGEAMPVAKKPGSTVIAGSINQNGSLLICATHVGADTTLSQIVKLVEEAQTSKAPIQQFADKLSGYFVPFIVFVSIATLLVWIVIGFLNFEIVETYFPGYNRSISRTETIIRFAFQASITVLCIACPCSLGLATPTAVMVGTGVGAQNGILIKGGEPLEMAHKVKVVVFDKTGTITHGTPVVNQVKVLTESNRISHHKILAIVGTAESNSEHPLGTAITKYCKQELDTETLGTCIDFQVVPGCGISCKVTNIEGLLHKNNWNIEDNNIKNASLVQIDASNEQSSTSSSMIIDAQISNALNAQQYKVLIGNREWMIRNGLVINNDVNDFMTEHERKGRTAVLVAVDDELCGLIAIADTVKPEAELAIHILKSMGLEVVLMTGDNSKTARSIASQVGITKVFAEVLPSHKVAKVKQLQEEGKRVAMVGDGINDSPALAMANVGIAIGTGTDVAIEAADVVLIRNDLLDVVASIDLSRETVKRIRINFVFALIYNLVGIPIAAGVFMPIGLVLQPWMGSAAMAASSVSVVLSSLFLKLYRKPTYESYELPARSQIGQKSPSEISVHVGIDDTSRNSPKLGLLDRIVNYSRASINSLLSDKRSLNSVVTSEPDKHSLLVGDFREDDDTAL

SEQ ID NO: 64 - protein, 1113 aa, Human
MFRRSLNRFCAGEEKRVGTRTVFVGNHPVSETEAYIAQRFCDNRIVSSKYTLWNFLPKNLFEQFRRIANFYFLIIFLVQVTVDTPTSPVTSGLPLFFVITVTAIKQGYEDCLRHRADNEVNKSTVYIIENAKRVRKESEKIKVGDVVEVQADETFPCDLILLSSCTTDGTCYVTTASLDGESNCKTHYAVRDTIALCTAESIDTLRAAIECEQPQPDLYKFVGRINIYSNSLEAVARSLGPENLLLKGATLKNTEKIYGVAVYTGMETKMALNYQGKSQKRSAVEKSINAFLIVYLFILLTKAAVCTTLKYVWQSTPYNDEPWYNQKTQKERETLKVLKMFTDFLSFMVLFNFIIPVSMYVTVEMQKFLGSFFISWDKDFYDEEINEGALVNTSDLNEELGQVDYVFTDKTGTLTENSMEFIECCIDGHKYKGVTQEVDGLSQTDGTLTYFDKVDKNREELFLRALCLCHTVEIKTNDAVDGATESAELTYISSSPDEIALVKGAKRYGFTFLGNRNGYMRVENQRKEIEEYELLHTLNFDAVRRRMSVIVKTQEGDILLFCKGADSAVFPRVQNHEIELTKVHVERNAMDGYRTLCVAFKEIAPDDYERINRQLIEAKMALQDREEKMEKVFDDIETNMNLIGATAVEDKLQDQAAETIEALHAAGLKVWVLTGDKMETAKSTCYACRLFQTNTELLELTTKTIEESERKEDRLHELLIEYRKKLLHEFPKSTRSFKKAWTEHQEYGLIIDGSTLSLILNSSQDSSSNNYKSIFLQICMKCTAVLCCRMAPLQKAQIVRMVKNLKGSPITLSIGDGANDVSMILESHVGIGKEGRQAARNSDYSVPKFKHLKKLLLAHGHLYYVRIAHLVQYFFYKNLCFILPQFLYQFFCGFSQQPLYDAAYLTMYNICFTSLPILAYSLLEQHINIDTLTSDPRLYMKISGNAMLQLGPFLYWTFLAAFEGTVFFFGTYFLFQTASLEENGKVYGNWTFGTIVFTVLVFTVTLKLALDTRFWTWINHFVIWGSLAFYVFFSFFWGGIIWPFLKQQRMYFVFAQMLSSVSTWLAIILLIFISLFPEILLIVLKNVRRRSARNPNLELPMLLSYKHTDSGYS

SEQ ID NO: 65 - protein, 415 aa, Human
MELRKYGPGRLAGTVIGGAAQSKSQTKSDSITKEFLPGLYTAPSSPFPPSQVSDHQVLNDAEVAALLENFSSSYDYGENESDSCCTSPPCPQDFSLNFDRAFLPALYSLLFLLGLLGNGAVAAVLLSRRTALSSTDTFLLHLAVADTLLVLTLPLWAVDAAVQWVFGSGLCKVAGALFNINFYAGALLLACISFDRYLNIVHATQLYRRGPPARVTLTCLAVWGLCLLFALPDFIFLSAHHDERLNATHCQYNFPQVGRTALRVLQLVAGFLLPLLVMAYCYAHILAVLLVSRGQRRLRAMRLVVVVVVAFALCWTPYHLVVLVDILMDLGALARNCGRESRVDVAKSVTSGLGYMHCCLNPLLYAFVGVKFRERMWMLLLRLGCPNQRGLQRQPSSSRRDSSWSETSEASYSGL

SEQ ID NO: 66 - protein, 255 aa, Human
MSSHRRKAKGRNRRSHRAMRVAHLELATYELAATESNPESSHPGYEAAMADRPQPGWRESLKMRVSKPFGMLMLSIWILLFVCYYLSYYLCSGSSYFVLANGHILPNSENAHGQSLEEDSALEALLNFFFPTTCNLRENQVAKPCNELQDLSESECLRHKCCFSSSGTTSFKCFAPFRDVPKQMMQMFGLGAISLILVCLPIYCRSLFWRSEPADDLQRQDNRVVTGLKKQRRKRKRKSEMLQKAARGREEHGDE

SEQ ID NO: 67 - protein, 1128 aa, Human
MQMVPSLPPASECAGEEKRVGTRTVFVGNHPVSETEAYIAQRFCDNRIVSSKYTLWNFLPKNLFEQFRRIANFYFLIIFLVQVTVDTPTSPVTSGLPLFFVITVTAIKQGYEDCLRHRADNEVNKSTVYIIENAKRVRKESEKIKVGDVVEVQADETFPCDLILLSSCTTDGTCYVTTASLDGESNCKTHYAVRDTIALCTAESIDTLRAAIECEQPQPDLYKFVGRINIYSNSLEAVARSLGPENLLLKGATLKNTEKIYGVAVYTGMETKMALNYQGKSQKRSAVEKSINAFLIVYLFILLTKAAVCTTLKYVWQSTPYNDEPWYNQKTQKERETLKVLKMFTDFLSFMVLFNFIIPVSMYVTVEMQKFLGSFFISWDKDFYDEEINEGALVNTSDLNEELGQVDYVFTDKTGTLTENSMEFIECCIDGHKYKGVTQEVDGLSQTDGTLTYFDKVDKNREELFLRALCLCHTVEIKTNDAVDGATESAELTYISSSPDEIALVKGAKRYGFTFLGNRNGYMRVENQRKEIEEYELLHTLNFDAVRRRMSVIVKTQEGDILLFCKGADSAVFPRVQNHEIELTKVHVERNAMDGYRTLCVAFKEIAPDDYERINRQLIEAKMALQDREEKMEKVFDDIETNMNLIGATAVEDKLQDQAAETIEALHAAGLKVWVLTGDKMETAKSTCYACRLFQTNTELLELTTKTIEESERKEDRLHELLIEYRKKLLHEFPKSTRSFKKAWTEHQEYGLIIDGSTLSLILNSSQDSSSNNYKSIFLQICMKCTAVLCCRMAPLQKAQIVRMVKNLKGSPITLSIGDGANDVSMILESHVGIGIKGKEGRQAARNSDYSVPKFKHLKKLLLAHGHLYYVRIAHLVQYFFYKNLCFILPQFLYQFFCGFSQQPLYDAAYLTMYNICFTSLPILAYSLLEQHINIDTLTSDPRLYMKISGNAMLQLGPFLYWTFLAAFEGTVFFFGTYFLFQTASLEENGKVYGNWTFGTIVFTVLVFTVTLKLALDTRFWTWINHFVIWGSLAFYVFFSFFWGGIIWPFLKQQRMYFVFAQMLSSVSTWLAIILLIFISLFPEILLIVLKNVRRRSARVTKRLPSSGTSAIFMLSQTSSNHSFSWSE

SEQ ID NO: 68 - protein, 1119 aa, Human
MQMVPSLPPASECAGEEKRVGTRTVFVGNHPVSETEAYIAQRFCDNRIVSSKYTLWNFLPKNLFEQFRRIANFYFLIIFLVQVTVDTPTSPVTSGLPLFFVITVTAIKQGYEDCLRHRADNEVNKSTVYIIENAKRVRKESEKIKVGDVVEVQADETFPCDLILLSSCTTDGTCYVTTASLDGESNCKTHYAVRDTIALCTAESIDTLRAAIECEQPQPDLYKFVGRINIYSNSLEAVARSLGPENLLLKGATLKNTEKIYGVAVYTGMETKMALNYQGKSQKRSAVEKSINAFLIVYLFILLTKAAVCTTLKYVWQSTPYNDEPWYNQKTQKERETLKVLKMFTDFLSFMVLFNFIIPVSMYVTVEMQKFLGSFFISWDKDFYDEEINEGALVNTSDLNEELGQVDYVFTDKTGTLTENSMEFIECCIDGHKYKGVTQEVDGLSQTDGTLTYFDKVDKNREELFLRALCLCHTVEIKTNDAVDGATESAELTYISSSPDEIALVKGAKRYGFTFLGNRNGYMRVENQRKEIEEYELLHTLNFDAVRRRMSVIVKTQEGDILLFCKGADSAVFPRVQNHEIELTKVHVERNAMDGYRTLCVAFKEIAPDDYERINRQLIEAKMALQDREEKMEKVFDDIETNMNLIGATAVEDKLQDQAAETIEALHAAGLKVWVLTGDKMETAKSTCYACRLFQTNTELLELTTKTIEESERKEDRLHELLIEYRKKLLHEFPKSTRSFKKAWTEHQEYGLIIDGSTLSLILNSSQDSSSNNYKSIFLQICMKCTAVLCCRMAPLQKAQIVRMVKNLKGSPITLSIGDGANDVSMILESHVGIGIKGKEGRQAARNSDYSVPKFKHLKKLLLAHGHLYYVRIAHLVQYFFYKNLCFILPQFLYQFFCGFSQQPLYDAAYLTMYNICFTSLPILAYSLLEQHINIDTLTSDPRLYMKISGNAMLQLGPFLYWTFLAAFEGTVFFFGTYFLFQTASLEENGKVYGNWTFGTIVFTVLVFTVTLKLALDTRFWTWINHFVIWGSLAFYVFFSFFWGGIIWPFLKQQRMYFVFAQMLSSVSTWLAIILLIFISLFPEILLIVLKNVRRRSARNPNLELPMLLSYKHTDSGYS

SEQ ID NO: 69 - protein, 72 aa, Human
MMQMFGLGAISLILVCLPIYCRSLFWRSEPADDLQRQDNRVVTGLKKQRRKRKRKSEMLQKAARGREEHGDE

SEQ ID NO: 70 - protein, 350 aa, Human
MNLRGLFQDFNPSKFLIYACLLLFSVLLALRLDGIIQWSYWAVFAPIWLWKLMVIVGASVGTGVWARNPQYRAEGETCVEFKAMLIAVGIHLLLLMFEVLVCDRIERGSHFWLLVFMPLFFVSPVSVAACVWGFRHDRSLELEILCSVNILQFIFIALRLDKIIHWPWLVVCVPLWILMSFLCLVVLYYIVWSVLFLRSMDVIAEQRRTHITMALSWMTIVVPLLTFEILLVHKLDGHNAFSCIPIFVPLWLSLITLMATTFGQKGGNHWWFGIRKDFCQFLLEIFPFLREYGNISYDLHHEDNEETEETPVPEPPKIAPMFRKKARVVITQSPGKYVLPPPKLNIEMPD

SEQ ID NO: 71 - protein, 156 aa, Human
MLGSPCGPQLSDRDADEDQCSREFRGRRSRRPPRRTMLRGKSRLNVEWLGYSPGLLLEHRPLLAGRTPRSHRRNESSLASTLKTLLFFTALMITVPIGLYFTTKSYIFEGALGMSNRDSYFYAAIVAVVAVHVVLALFVYVAWNEGSRQWREGKQD

SEQ ID NO: 72 - protein, 635 aa, Human
MAKKSAENGIYSVSGDEKKGPLIAPGPDGAPAKGDGPVGLGTPGGRLAVPPRETWTRQMDFIMSCVGFAVGLGNVWRFPYLCYKNGGGVFLIPYVLIALVGGIPIFFLEISLGQFMKAGSINVWNICPLFKGLGYASMVIVFYCNTYYIMVLAWGFYYLVKSFTTTLPWATCGHTWNTPDCVEIFRHEDCANASLANLTCDQLADRRSPVIEFWENKVLRLSGGLEVPGALNWEVTLCLLACWVLVYFCVWKGVKSTGKIVYFTATFPYVVLVVLLVRGVLLPGALDGIIYYLKPDWSKLGSPQVWIDAGTQIFFSYAIGLGALTALGSYNRFNNNCYKDAIILALINSGTSFFAGFVVFSILGFMAAEQGVHISKVAESGPGLAFIAYPRAVTLMPVAPLWAALFFFMLLLLGLDSQFVGVEGFITGLLDLLPASYYFRFQREISVALCCALCFVIDLSMVTDGGMYVFQLFDYYSASGTTLLWQAFWECVVVAWVYGADRFMDDIACMIGYRPCPWMKWCWSFFTPLVCMGIFIFNVVYYEPLVYNNTYVYPWWGEAMGWAFALSSMLCVPLHLLGCLLRAKGTMAERWQHLTQPIWGLHHLEYRAQDADVRGLTTLTPVSESSKVVVVESVM

SEQ ID NO: 73 - protein, 1220 aa, Human
MGDMANSSIEFHPKPQQQRDVPQAGGFGCTLAELRTLMELRGAEALQKIEEAYGDVSGLCRRLKTSPTEGLADNTNDLEKRRQIYGQNFIPPKQPKTFLQLVWEALQDVTLIILEVAAIVSLGLSFYAPPGEESEACGNVSGGAEDEGEAEAGWIEGAAILLSVICVVLVTAFNDWSKEKQFRGLQSRIEQEQKFTVIRNGQLLQVPVAALVVGDIAQVKYGDLLPADGVLIQANDLKIDESSLTGESDHVRKSADKDPMLLSGTHVMEGSGRMVVTAVGVNSQTGIIFTLLGAGGEEEEKKDKKGKQQDGAMESSQTKAKKQDGAVAMEMQPLKSAEGGEMEEREKKKANAPKKEKSVLQGKLTKLAVQIGKAGLVMSAITVIILVLYFVIETFVVEGRTWLAECTPVYVQYFVKFFIIGVTVLVVAVPEGLPLAVTISLAYSVKKMMKDNNLVRHLDACETMGNATAICSDKTGTLTTNRMTVVQSYLGDTHYKEIPAPSALTPKILDLLVHAISINSAYTTKILPPEKEGALPRQVGNKTECALLGFVLDLKRDFQPVREQIPEDKLYKVYTFNSVRKSMSTVIRMPDGGFRLFSKGASEILLKKCTNILNSNGELRGFRPRDRDDMVRKIIEPMACDGLRTICIAYRDFSAGQEPDWDNENEVVGDLTCIAVVGIEDPVRPEVPEAIRKCQRAGITVRMVTGDNINTARAIAAKCGIIQPGEDFLCLEGKEFNRRIRNEKGEIEQERLDKVWPKLRVLARSSPTDKHTLVKGIIDSTTGEQRQVVAVTGDGTNDGPALKKADVGFAMGIAGTDVAKEASDIILTDDNFTSIVKAVMWGRNVYDSISKFLQFQLTVNVVAVIVAFTGACITQDSPLKAVQMLWVNLIMDTFASLALATEPPTESLLLRKPYGRDKPLISRTMMKNILGHAVYQLAIIFTLLFVGELFFDIDSGRNAPLHSPPSEHYTIIFNTFVMMQLFNEINARKIHGERNVFDGIFSNPIFCTIVLGTFGIQIVIVQFGGKPFSCSPLSTEQWLWCLFVGVGELVWGQVIATIPTSQLKCLKEAGHGPGKDEMTDEELAEGEEEIDHAERELRRGQILWFRGLNRIQTQIRVVKAFRSSLYEGLEKPESKTSIHNFMATPEFLINDYTHNIPLIDDTDVDENEERLRAPPPPSPNQNNNAIDSGIYLTTHVTKSATSSVFSSSPGSPLHSVETSL

SEQ ID NO: 74 - protein, 635 aa, Human; identical to SEQ ID NO: 72

SEQ ID NO: 75 - protein, 1159 aa, Human
MGDMANSSIEFHPKPQQQRDVPQAGGFGCTLAELRTLMELRGAEALQKIEEAYGDVSGLCRRLKTSPTEGLADNTNDLEKRRQIYGQNFIPPKQPKTFLQLVWEALQDVTLIILEVAAIVSLGLSFYAPPGEESEACGNVSGGAEDEGEAEAGWIEGAAILLSVICVVLVTAFNDWSKEKQFRGLQSRIEQEQKFTVIRNGQLLQVPVAALVVGDIAQVKYGDLLPADGVLIQANDLKIDESSLTGESDHVRKSADKDPMLLSGTHVMEGSGRMVVTAVGVNSQTGIIFTLLGAGGEEEEKKDKKAKKQDGAVAMEMQPLKSAEGGEMEEREKKKANAPKKEKSVLQGKLTKLAVQIGKAGLVMSAITVIILVLYFVIETFVVEGRTWLAECTPVYVQYFVKFFIIGVTVLVVAVPEGLPLAVTISLAYSVKKMMKDNNLVRHLDACETMGNATAICSDKTGTLTTNRMTVVQSYLGDTHYKEIPAPSALTPKILDLLVHAISINSAYTTKILPPEKEGALPRQVGNKTECALLGFVLDLKRDFQPVREQIPEDKLYKVYTFNSVRKSMSTVIRMPDGGFRLFSKGASEILLKKCTNILNSNGELRGFRPRDRDDMVRKIIEPMACDGLRTICIAYRDFSAGQEPDWDNENEVVGDLTCIAVVGIEDPVRPEVPEAIRKCQRAGITVRMVTGDNINTARAIAAKCGIIQPGEDFLCLEGKEFNRRIRNEKGEIEQERLDKVWPKLRVLARSSPTDKHTLVKGIIDSTTGEQRQVVAVTGDGTNDGPALKKADVGFAMGIAGTDVAKEASDIILTDDNFTSIVKAVMWGRNVYDSISKFLQFQLTVNVVAVIVAFTGACITQDSPLKAVQMLWVNLIMDTFASLALATEPPTESLLLRKPYGRDKPLISRTMMKNILGHAVYQLAIIFTLLFVGELFFDIDSGRNAPLHSPPSEHYTIIFNTFVMMQLFNEINARKIHGERNVFDGIFSNPIFCTIVLGTFGIQIVIVQFGGKPFSCSPLSTEQWLWCLFVGVGELVWGQVIATIPTSQLKCLKEAGHGPGKDEMTDEELAEGEEEIDHAERELRRGQILWFRGLNRIQTQMEVVSTFKRSGSVQGAVRRRSSVLSQLHDVTNLSTPTHAILSAANPTSAAGNPGGESVP

SEQ ID NO: 76 - protein, 101 aa, Human
MERPDKAALNALQPPEFRNESSLASTLKTLLFFTALMITVPIGLYFTTKSYIFEGALGMSNRDSYFYAAIVAVVAVHVVLALFVYVAWNEGSRQWREGKQD

SEQ ID NO: 77 - protein, 728 aa, Human
MLPTLQIQGPAAFAPGDRGPGRHCPFPVPITPTGALLPVSDSCDSLVDLVWPSVTYLALGTQSRVWPHPLGAPGQAGESPEQRRQCLELWDMASSLGDKVPRAACGKRGQTVWQLHLACLCLAQFHSPPAQPPPLSRRGGGPDPDPISRSLPGPPTPALPTHSYSSHSPRAPRLLSPLRRAPRGSPAPHRHASLQTNEAPRELPHCTWPGLPGRSLAPSFLWREPWLGGQWGPLNIPARKGDRRRWEWGCEGGGATASAEQPPQIVYFTATFPYVVLVVLLVRGVLLPGALDGIIYYLKPDWSKLGSPQVWIDAGTQIFFSYAIGLGALTALGSYNRFNNNCYKDAIILALINSGTSFFAGFVVFSILGFMAAEQGVHISKVAESGPGLAFIAYPRAVTLMPVAPLWAALFFFMLLLLGLDSQVCMGLWDREPGGGRREGCRQGKGWRCGARPELPWPQFVGVEGFITGLLDLLPASYYFRFQREISVALCCALCFVIDLSMVTDVSGVGGLPVTSGGRLPSSLTGLCPGGMYVFQLFDYYSASGTTLLWQAFWECVVVAWVYGRSWLRAGLGDGGGEGRSPAWPSRLTSPQADRFMDDIACMIGYRPCPWMKWCWSFFTPLVCMGIFIFNVVYYEPLVYNNTYVYPWWGEAMGWAFALSSMLCVPLHLLGCLLRAKGTMAERWQHLTQPIWGLHHLEYRAQDADVRGLTTLTPVSESSKVVVVESVM

SEQ ID NO: 78 - protein, 1108 aa, Human
MQMVPSLPPASECAGEEKRVGTRTVFVGNHPVSETEAYIAQRFCDNRIVSSKYTLWNFLPKNLFEQFRRIANFYFLIIFLVQVTVDTPTSPVTSGLPLFFVITVTAIKQGYEDCLRHRADNEVNKSTVYIIENAKRVRKESEKIKVGDVVEVQADETFPCDLILLSSCTTDGTCYVTTASLDGESNCKTHYAVRDTIALCTAESIDTLRAAIECEQPQPDLYKFVGRINIYSNSLEAVARSLGPENLLLKGATLKNTEKIYGVAVYTGMETKMALNYQGKSQKRSAVEKSINAFLIVYLFILLTKAAVCTTLKYVWQSTPYNDEPWYNQKTQKERETLKVLKMFTDFLSFMVLFNFIIPVSMYVTVEMQKFLGSFFISWDKDFYDEEINEGALVNTSDLNEELGQVDYVFTDKTGTLTENSMEFIECCIDGHKYKGVTQEVDGLSQTDGTLTYFDKVDKNREELFLRALCLCHTVEIKTNDAVDGATESAELTYISSSPDEIALVKGAKRYGFTFLGNRNGYMRVENQRKEIEEYELLHTLNFDAVRRRMSVIVKTQEGDILLFCKGADSAVFPRVQNHEIELTKVHVERNAMDGYRTLCVAFKEIAPDDYERINRQLIEAKMALQDREEKMEKVFDDIETNMNLIGATAVEDKLQDQAAETIEALHAAGLKVWVLTGDKMETAKSTCYACRLFQTNTELLELTTKTIEESERKEDRLHELLIEYRKKLLHEFPKSTRSFKKAWTEHQEYGLIIDGSTLSLILNSSQDSSSNNYKSIFLQICMKCTAVLCCRMAPLQKAQIVRMVKNLKGSPITLSIGDGANDVSMILESHVGIGIKGKEGRQAARNSDYSVPKFKHLKKLLLAHGHLYYVRIAHLVQYFFYKNLCFILPQFLYQFFCGFSQQPLYDAAYLTMYNICFTSLPILAYSLLEQHINIDTLTSDPRLYMKISGNAMLQLGPFLYWTFLAAFEGTVFFFGTYFLFQTASLEENGKVYGNWTFGTIVFTVLVFTVTLKLALDTRFWTWINHFVIWGSLAFYVFFSFFWGGIIWPFLKQQRMYFVFAQMLSSVSTWLAIILLIFISLFPEILLIVLKNVRRRSARVHHLISSSA

SEQ ID NO: 79 - protein, 1132 aa, Human
MQMVPSLPPASECAGEEKRVGTRTVFVGNHPVSETEAYIAQRFCDNRIVSSKYTLWNFLPKNLFEQFRRIANFYFLIIFLVQVTVDTPTSPVTSGLPLFFVITVTAIKQGYEDCLRHRADNEVNKSTVYIIENAKRVRKESEKIKVGDVVEVQADETFPCDLILLSSCTTDGTCYVTTASLDGESNCKTHYAVRDTIALCTAESIDTLRAAIECEQPQPDLYKFVGRINIYSNSLEAVARSLGPENLLLKGATLKNTEKIYGVAVYTGMETKMALNYQGKSQKRSAVEKSINAFLIVYLFILLTKAAVCTTLKYVWQSTPYNDEPWYNQKTQKERETLKVLKMFTDFLSFMVLFNFIIPVSMYVTVEMQKFLGSFFISWDKDFYDEEINEGALVNTSDLNEELGQVDYVFTDKTGTLTENSMEFIECCIDGHKYKGVTQEVDGLSQTDGTLTYFDKVDKNREELFLRALCLCHTVEIKTNDAVDGATESAELTYISSSPDEIALVKGAKRYGFTFLGNRNGYMRVENQRKEIEEYELLHTLNFDAVRRRMSVIVKTQEGDILLFCKGADSAVFPRVQNHEIELTKVHVERNAMDGYRTLCVAFKEIAPDDYERINRQLIEAKMALQDREEKMEKVFDDIETNMNLIGATAVEDKLQDQAAETIEALHAAGLKVWVLTGDKMETAKSTCYACRLFQTNTELLELTTKTIEESERKEDRLHELLIEYRKKLLHEFPKSTRSFKKAWTEHQEYGLIIDGSTLSLILNSSQDSSSNNYKSIFLQICMKCTAVLCCRMAPLQKAQIVRMVKNLKGSPITLSIGDGANDVSMILESHVGIGIKGKEGRQAARNSDYSVPKFKHLKKLLLAHGHLYYVRIAHLVQYFFYKNLCFILPQFLYQFFCGFSQQPLYDAAYLTMYNICFTSLPILAYSLLEQHINIDTLTSDPRLYMKISGNAMLQLGPFLYWTFLAAFEGTVFFFGTYFLFQTASLEENGKVYGNWTFGTIVFTVLVFTVTLKLALDTRFWTWINHFVIWGSLAFYVFFSFFWGGIIWPFLKQQRMYFVFAQMLSSVSTWLAIILLIFISLFPEILLIVLKNVRRRSARRNLSCRRASDSLSARPSVRPLLLRTFSDESNVL

SEQ ID NO: 80 - protein, 1206 aa, Human
MGDMANSSIEFHPKPQQQRDVPQAGGFGCTLAELRTLMELRGAEALQKIEEAYGDVSGLCRRLKTSPTEGLADNTNDLEKRRQIYGQNFIPPKQPKTFLQLVWEALQDVTLIILEVAAIVSLGLSFYAPPGEESEACGNVSGGAEDEGEAEAGWIEGAAILLSVICVVLVTAFNDWSKEKQFRGLQSRIEQEQKFTVIRNGQLLQVPVAALVVGDIAQVKYGDLLPADGVLIQANDLKIDESSLTGESDHVRKSADKDPMLLSGTHVMEGSGRMVVTAVGVNSQTGIIFTLLGAGGEEEEKKDKKAKKQDGAVAMEMQPLKSAEGGEMEEREKKKANAPKKEKSVLQGKLTKLAVQIGKAGLVMSAITVIILVLYFVIETFVVEGRTWLAECTPVYVQYFVKFFIIGVTVLVVAVPEGLPLAVTISLAYSVKKMMKDNNLVRHLDACETMGNATAICSDKTGTLTTNRMTVVQSYLGDTHYKEIPAPSALTPKILDLLVHAISINSAYTTKILPPEKEGALPRQVGNKTECALLGFVLDLKRDFQPVREQIPEDKLYKVYTFNSVRKSMSTVIRMPDGGFRLFSKGASEILLKKCTNILNSNGELRGFRPRDRDDMVRKIIEPMACDGLRTICIAYRDFSAGQEPDWDNENEVVGDLTCIAVVGIEDPVRPEVPEAIRKCQRAGITVRMVTGDNINTARAIAAKCGIIQPGEDFLCLEGKEFNRRIRNEKGEIEQERLDKVWPKLRVLARSSPTDKHTLVKGIIDSTTGEQRQVVAVTGDGTNDGPALKKADVGFAMGIAGTDVAKEASDIILTDDNFTSIVKAVMWGRNVYDSISKFLQFQLTVNVVAVIVAFTGACITQDSPLKAVQMLWVNLIMDTFASLALATEPPTESLLLRKPYGRDKPLISRTMMKNILGHAVYQLAIIFTLLFVGELFFDIDSGRNAPLHSPPSEHYTIIFNTFVMMQLFNEINARKIHGERNVFDGIFSNPIFCTIVLGTFGIQIVIVQFGGKPFSCSPLSTEQWLWCLFVGVGELVWGQVIATIPTSQLKCLKEAGHGPGKDEMTDEELAEGEEEIDHAERELRRGQILWFRGLNRIQTQIRVVKAFRSSLYEGLEKPESKTSIHNFMATPEFLINDYTHNIPLIDDTDVDENEERLRAPPPPSPNQNNNAIDSGIYLTTHVTKSATSSVFSSSPGSPLHSVETSL

SEQ ID NO: 81 - protein, 1253 aa, Human
MVVALRYVWPLLLCSPCLLIQIPEEYEGHHVMEPPVITEQSPRRLVVFPTDDISLKCEASGKPEVQFRWTRDGVHFKPKEELGVTVYQSPHSGSFTITGNNSNFAQRFQGIYRCFASNKLGTAMSHEIRLMAEGAPKWPKETVKPVEVEEGESVVLPCNPPPSAEPLRIYWMNSKILHIKQDERVTMGQNGNLYFANVLTSDNHSDYICHAHFPGTRTIIQKEPIDLRVKATNSMIDRKPRLLFPTNSSSHLVALQGQPLVLECIAEGFPTPTIKWLRPSGPMPADRVTYQNHNKTLQLLKVGEEDDGEYRCLAENSLGSARHAYYVTVEAAPYWLHKPQSHLYGPGETARLDCQVQGRPQPEVTWRINGIPVEELAKDQKYRIQRGALILSNVQPSDTMVTQCEARNRHGLLLANAYIYVVQLPAKILTADNQTYMAVQGSTAYLLCKAFGAPVPSVQWLDEDGTTVLQDERFFPYANGTLGIRDLQANDTGRYFCLAANDQNNVTIMANLKVKDATQITQGPRSTIEKKGSRVTFTCQASFDPSLQPSITWRGDGRDLQELGDSDKYFIEDGRLVIHSLDYSDQGNYSCVASTELDVVESRAQLLVVGSPGPVPRLVLSDLHLLTQSQVRVSWSPAEDHNAPIEKYDIEFEDKEMAPEKWYSLGKVPGNQTSTTLKLSPYVHYTFRVTAINKYGPGEPSPVSETVVTPEAAPEKNPVDVKGEGNETTNMVITWKPLRWMDWNAPQVQYRVQWRPQGTRGPWQEQIVSDPFLVVSNTSTFVPYEIKVQAVNSQGKGPEPQVTIGYSGEDYPQAIPELEGIEILNSSAVLVKWRPVDLAQVKGHLRGYNVTYWREGSQRKHSKRHIHKDHVVVPANTTSVILSGLRPYSSYHLEVQAFNGRGSGPASEFTFSTPEGVPGHPEALHLECQSNTSLLLRWQPPLSHNGVLTGYVLSYHPLDEGGKGQLSFNLRDPELRTHNLTDLSPHLRYRFQLQATTKEGPGEAIVREGGTMALSGISDFGNISATAGENYSVVSWVPKEGQCNFRFHILFKALGEEKGGASLSPQYVSYNQSSYTQWDLQPDTDYEIHLFKERMFRHQMAVKTNGTGRVRLPPAGFATEGWFIGFVSAIILLLLVLLILCFIKRSKGGKYSVKDKEDTQVDSEARPMKDETFGEYSDNEEKAFGSSQPSLNGDIKPLGSDDSLADYGGSVDVQFNEDGSFIGQYSGKKEKEAAGGNDSSGATSPINPAVALE

SEQ ID NO: 82 - protein, 1257 aa, Human
MVVALRYVWPLLLCSPCLLIQIPEEYEGHHVMEPPVITEQSPRRLVVFPTDDISLKCEASGKPEVQFRWTRDGVHFKPKEELGVTVYQSPHSGSFTITGNNSNFAQRFQGIYRCFASNKLGTAMSHEIRLMAEGAPKWPKETVKPVEVEEGESVVLPCNPPPSAEPLRIYWMNSKILHIKQDERVTMGQNGNLYFANVLTSDNHSDYICHAHFPGTRTIIQKEPIDLRVKATNSMIDRKPRLLFPTNSSSHLVALQGQPLVLECIAEGFPTPTIKWLRPSGPMPADRVTYQNHNKTLQLLKVGEEDDGEYRCLAENSLGSARHAYYVTVEAAPYWLHKPQSHLYGPGETARLDCQVQGRPQPEVTWRINGIPVEELAKDQKYRIQRGALILSNVQPSDTMVTQCEARNRHGLLLANAYIYVVQLPAKILTADNQTYMAVQGSTAYLLCKAFGAPVPSVQWLDEDGTTVLQDERFFPYANGTLGIRDLQANDTGRYFCLAANDQNNVTIMANLKVKDATQITQGPRSTIEKKGSRVTFTCQASFDPSLQPSITWRGDGRDLQELGDSDKYFIEDGRLVIHSLDYSDQGNYSCVASTELDVVESRAQLLVVGSPGPVPRLVLSDLHLLTQSQVRVSWSPAEDHNAPIEKYDIEFEDKEMAPEKWYSLGKVPGNQTSTTLKLSPYVHYTFRVTAINKYGPGEPSPVSETVVTPEAAPEKNPVDVKGEGNETTNMVITWKPLRWMDWNAPQVQYRVQWRPQGTRGPWQEQIVSDPFLVVSNTSTFVPYEIKVQAVNSQGKGPEPQVTIGYSGEDYPQAIPELEGIEILNSSAVLVKWRPVDLAQVKGHLRGYNVTYWREGSQRKHSKRHIHKDHVVVPANTTSVILSGLRPYSSYHLEVQAFNGRGSGPASEFTFSTPEGVPGHPEALHLECQSNTSLLLRWQPPLSHNGVLTGYVLSYHPLDEGGKGQLSFNLRDPELRTHNLTDLSPHLRYRFQLQATTKEGPGEAIVREGGTMALSGISDFGNISATAGENYSVVSWVPKEGQCNFRFHILFKALGEEKGGASLSPQYVSYNQSSYTQWDLQPDTDYEIHLFKERMFRHQMAVKTNGTGRVRLPPAGFATEGWFIGFVSAIILLLLVLLILCFIKRSKGGKYSVKDKEDTQVDSEARPMKDETFGEYRSLESDNEEKAFGSSQPSLNGDIKPLGSDDSLADYGGSVDVQFNEDGSFIGQYSGKKEKEAAGGNDSSGATSPINPAVALE

SEQ ID NO: 83 - protein, 1253 aa, Human
MVVALRYVWPLLLCSPCLLIQIPEEYEGHHVMEPPVITEQSPRRLVVFPTDDISLKCEASGKPEVQFRWTRDGVHFKPKEELGVTVYQSPHSGSFTITGNNSNFAQRFQGIYRCFASNKLGTAMSHEIRLMAEGAPKWPKETVKPVEVEEGESVVLPCNPPPSAEPLRIYWMNSKILHIKQDERVTMGQNGNLYFANVLTSDNHSDYICHAHFPGTRTIIQKEPIDLRVKATNSMIDRKPRLLFPTNSSSHLVALQGQPLVLECIAEGFPTPTIKWLRPSGPMPADRVTYQNHNKTLQLLKVGEEDDGEYRCLAENSLGSARHAYYVTVEAAPYWLHKPQSHLYGPGETARLDCQVQGRPQPEVTWRINGIPVEELAKDQKYRIQRGALILSNVQPSDTMVTQCEARNRHGLLLANAYIYVVQLPAKILTADNQTYMAVQGSTAYLLCKAFGAPVPSVQWLDEDGTTVLQDERFFPYANGTLGIRDLQANDTGRYFCLAANDQNNVTIMANLKVKDATQITQGPRSTIEKKGSRVTFTCQASFDPSLQPSITWRGDGRDLQELGDSDKYFIEDGRLVIHSLDYSDQGNYSCVASTELDVVESRAQLLVVGNPGPVPRLVLSDLHLLTQSQVRVSWSPAEDHNAPIEKYDIEFEDKEMAPEKWYSLGKVPGNQTSTTLKLSPYVHYTFRVTAINKYGPGEPSPVSETVVTPEAAPEKNPVDVKGEGNETTNMVITWKPLRWMDWNAPQVQYRVQWRPQGTRGPWQEQIVSDPFLVVSNTSTFVPYEIKVQAVNSQGKGPEPQVTIGYSGEDYPQAIPELEGIEILNSSAVLVKWRPVDLAQVKGHLRGYNVTYWREGSQRKHSKRHIHKDHVVVPANTTSVILSGLRPYSSYHLEVQAFNGRGSGPASEFTFSTPEGVPGHPEALHLECQSNTSLLLRWQPPLSHNGVLTGYVLSYHPLDEGGKGQLSFNLRDPELRTHNLTDLSPHLRYRFQLQATTKEGPGEAIVREGGTMALSGISDFGNISATAGENYSVVSWVPKEGQCNFRFHILFKALGEEKGGASLSPQYVSYNQSSYTQWDLQPDTDYEIHLFKERMFRHQMAVKTNGTGRVRLPPAGFATEGWFIGFVSAIILLLLVLLILCFIKRSKGGKYSVKDKEDTQVDSEARPMKDETFGEYSDNEEKAFGSSQPSLNGDIKPLGSDDSLADYGGSVDVQFNEDGSFIGQYSGKKEKEAAGGNDSSGATSPINPAVALE

SEQ ID NO: 84 - protein, 1220 aa, Human; identical to SEQ ID NO: 73

SEQ ID NO: 85 - protein, 1257 aa, Human; identical to SEQ ID NO: 82

SEQ ID NO: 86 - protein, 1173 aa, Human
MGDMANSSIEFHPKPQQQRDVPQAGGFGCTLAELRTLMELRGAEALQKIEEAYGDVSGLCRRLKTSPTEGLADNTNDLEKRRQIYGQNFIPPKQPKTFLQLVWEALQDVTLIILEVAAIVSLGLSFYAPPGEESEACGNVSGGAEDEGEAEAGWIEGAAILLSVICVVLVTAFNDWSKEKQFRGLQSRIEQEQKFTVIRNGQLLQVPVAALVVGDIAQVKYGDLLPADGVLIQANDLKIDESSLTGESDHVRKSADKDPMLLSGTHVMEGSGRMVVTAVGVNSQTGIIFTLLGAGGEEEEKKDKKGKQQDGAMESSQTKAKKQDGAVAMEMQPLKSAEGGEMEEREKKKANAPKKEKSVLQGKLTKLAVQIGKAGLVMSAITVIILVLYFVIETFVVEGRTWLAECTPVYVQYFVKFFIIGVTVLVVAVPEGLPLAVTISLAYSVKKMMKDNNLVRHLDACETMGNATAICSDKTGTLTTNRMTVVQSYLGDTHYKEIPAPSALTPKILDLLVHAISINSAYTTKILPPEKEGALPRQVGNKTECALLGFVLDLKRDFQPVREQIPEDKLYKVYTFNSVRKSMSTVIRMPDGGFRLFSKGASEILLKKCTNILNSNGELRGFRPRDRDDMVRKIIEPMACDGLRTICIAYRDFSAGQEPDWDNENEVVGDLTCIAVVGIEDPVRPEVPEAIRKCQRAGITVRMVTGDNINTARAIAAKCGIIQPGEDFLCLEGKEFNRRIRNEKGEIEQERLDKVWPKLRVLARSSPTDKHTLVKGIIDSTTGEQRQVVAVTGDGTNDGPALKKADVGFAMGIAGTDVAKEASDIILTDDNFTSIVKAVMWGRNVYDSISKFLQFQLTVNVVAVIVAFTGACITQDSPLKAVQMLWVNLIMDTFASLALATEPPTESLLLRKPYGRDKPLISRTMMKNILGHAVYQLAIIFTLLFVGELFFDIDSGRNAPLHSPPSEHYTIIFNTFVMMQLFNEINARKIHGERNVFDGIFSNPIFCTIVLGTFGIQIVIVQFGGKPFSCSPLSTEQWLWCLFVGVGELVWGQVIATIPTSQLKCLKEAGHGPGKDEMTDEELAEGEEEIDHAERELRRGQILWFRGLNRIQTQMEVVSTFKRSGSVQGAVRRRSSVLSQLHDVTNLSTPTHAILSAANPTSAAGNPGGESVP

SEQ ID NO: 87 - protein, 1257 aa, Human
MVVALRYVWPLLLCSPCLLIQIPEEYEGHHVMEPPVITEQSPRRLVVFPTDDISLKCEASGKPEVQFRWTRDGVHFKPKEELGVTVYQSPHSGSFTITGNNSNFAQRFQGIYRCFASNKLGTAMSHEIRLMAEGAPKWPKETVKPVEVEEGESVVLPCNPPPSAEPLRIYWMNSKILHIKQDERVTMGQNGNLYFANVLTSDNHSDYICHAHFPGTRTIIQKEPIDLRVKATNSMIDRKPRLLFPTNSSSHLVALQGQPLVLECIAEGFPTPTIKWLRPSGPMPADRVTYQNHNKTLQLLKVGEEDDGEYRCLAENSLGSARHAYYVTVEAAPYWLHKPQSHLYGPGETARLDCQVQGRPQPEVTWRINGIPVEELAKDQKYRIQRGALILSNVQPSDTMVTQCEARNRHGLLLANAYIYVVQLPAKILTADNQTYMAVQGSTAYLLCKAFGAPVPSVQWLDEDGTTVLQDERFFPYANGTLGIRDLQANDTGRYFCLAANDQNNVTIMANLKVKDATQITQGPRSTIEKKGSRVTFTCQASFDPSLQPSITWRGDGRDLQELGDSDKYFIEDGRLVIHSLDYSDQGNYSCVASTELDVVESRAQLLVVGNPGPVPRLVLSDLHLLTQSQVRVSWSPAEDHNAPIEKYDIEFEDKEMAPEKWYSLGKVPGNQTSTTLKLSPYVHYTFRVTAINKYGPGEPSPVSETVVTPEAAPEKNPVDVKGEGNETTNMVITWKPLRWMDWNAPQVQYRVQWRPQGTRGPWQEQIVSDPFLVVSNTSTFVPYEIKVQAVNSQGKGPEPQVTIGYSGEDYPQAIPELEGIEILNSSAVLVKWRPVDLAQVKGHLRGYNVTYWREGSQRKHSKRHIHKDHVVVPANTTSVILSGLRPYSSYHLEVQAFNGRGSGPASEFTFSTPEGVPGHPEALHLECQSNTSLLLRWQPPLSHNGVLTGYVLSYHPLDEGGKGQLSFNLRDPELRTHNLTDLSPHLRYRFQLQATTKEGPGEAIVREGGTMALSGISDFGNISATAGENYSVVSWVPKEGQCNFRFHILFKALGEEKGGASLSPQYVSYNQSSYTQWDLQPDTDYEIHLFKERMFRHQMAVKTNGTGRVRLPPAGFATEGWFIGFVSAIILLLLVLLILCFIKRSKGGKYSVKDKEDTQVDSEARPMKDETFGEYRSLESDNEEKAFGSSQPSLNGDIKPLGSDDSLADYGGSVDVQFNEDGSFIGQYSGKKEKEAAGGNDSSGATSPINPAVALE

SEQ ID NO: 88 - protein, 1129 aa, Human
MGDMANSSIEFHPKPQQQRDVPQAGGFGCTLAELRTLMELRGAEALQKIEEAYGDVSGLCRRLKTSPTEGLADNTNDLEKRRQIYGQNFIPPKQPKTFLQLVWEALQDVTLIILEVAAIVSLGLSFYAPPGEESEACGNVSGGAEDEGEAEAGWIEGAAILLSVICVVLVTAFNDWSKEKQFRGLQSRIEQEQKFTVIRNGQLLQVPVAALVVGDIAQVKYGDLLPADGVLIQANDLKIDESSLTGESDHVRKSADKDPMLLSGTHVMEGSGRMVVTAVGVNSQTGIIFTLLGAGGEEEEKKDKKGKQQDGAMESSQTKAKKQDGAVAMEMQPLKSAEGGEMEEREKKKANAPKKEKSVLQGKLTKLAVQIGKAGLVMSAITVIILVLYFVIETFVVEGRTWLAECTPVYVQYFVKFFIIGVTVLVVAVPEGLPLAVTISLAYSVKKMMKDNNLVRHLDACETMGNATAICSDKTGTLTTNRMTVVQSYLGDTHYKEIPAPSALTPKILDLLVHAISINSAYTTKILPPEKEGALPRQVGNKTECALLGFVLDLKRDFQPVREQIPEDKLYKVYTFNSVRKSMSTVIRMPDGGFRLFSKGASEILLKKCTNILNSNGELRGFRPRDRDDMVRKIIEPMACDGLRTICIAYRDFSAGQEPDWDNENEVVGDLTCIAVVGIEDPVRPEVPEAIRKCQRAGITVRMVTGDNINTARAIAAKCGIIQPGEDFLCLEGKEFNRRIRNEKGEIEQERLDKVWPKLRVLARSSPTDKHTLVKGIIDSTTGEQRQVVAVTGDGTNDGPALKKADVGFAMGIAGTDVAKEASDIILTDDNFTSIVKAVMWGRNVYDSISKFLQFQLTVNVVAVIVAFTGACITQDSPLKAVQMLWVNLIMDTFASLALATEPPTESLLLRKPYGRDKPLISRTMMKNILGHAVYQLAIIFTLLFVGELFFDIDSGRNAPLHSPPSEHYTIIFNTFVMMQLFNEINARKIHGERNVFDGIFSNPIFCTIVLGTFGIQIVIVQFGGKPFSCSPLSTEQWLWCLFVGVGELVWGQVIATIPTSQLKCLKEAGHGPGKDEMTDEELAEGEEEIDHAERELRRGQILWFRGLNRIQTQVCWRGKTRLRTMKYF

SEQ ID NO: 89 - protein, 1248 aa, Human
MVVALRYVWPLLLCSPCLLIQIPEELMEPPVITEQSPRRLVVFPTDDISLKCEASGKPEVQFRWTRDGVHFKPKEELGVTVYQSPHSGSFTITGNNSNFAQRFQGIYRCFASNKLGTAMSHEIRLMAEGAPKWPKETVKPVEVEEGESVVLPCNPPPSAEPLRIYWMNSKILHIKQDERVTMGQNGNLYFANVLTSDNHSDYICHAHFPGTRTIIQKEPIDLRVKATNSMIDRKPRLLFPTNSSSHLVALQGQPLVLECIAEGFPTPTIKWLRPSGPMPADRVTYQNHNKTLQLLKVGEEDDGEYRCLAENSLGSARHAYYVTVEAAPYWLHKPQSHLYGPGETARLDCQVQGRPQPEVTWRINGIPVEELAKDQKYRIQRGALILSNVQPSDTMVTQCEARNRHGLLLANAYIYVVQLPAKILTADNQTYMAVQGSTAYLLCKAFGAPVPSVQWLDEDGTTVLQDERFFPYANGTLGIRDLQANDTGRYFCLAANDQNNVTIMANLKVKDATQITQGPRSTIEKKGSRVTFTCQASFDPSLQPSITWRGDGRDLQELGDSDKYFIEDGRLVIHSLDYSDQGNYSCVASTELDVVESRAQLLVVGSPGPVPRLVLSDLHLLTQSQVRVSWSPAEDHNAPIEKYDIEFEDKEMAPEKWYSLGKVPGNQTSTTLKLSPYVHYTFRVTAINKYGPGEPSPVSETVVTPEAAPEKNPVDVKGEGNETTNMVITWKPLRWMDWNAPQVQYRVQWRPQGTRGPWQEQIVSDPFLVVSNTSTFVPYEIKVQAVNSQGKGPEPQVTIGYSGEDYPQAIPELEGIEILNSSAVLVKWRPVDLAQVKGHLRGYNVTYWREGSQRKHSKRHIHKDHVVVPANTTSVILSGLRPYSSYHLEVQAFNGRGSGPASEFTFSTPEGVPGHPEALHLECQSNTSLLLRWQPPLSHNGVLTGYVLSYHPLDEGGKGQLSFNLRDPELRTHNLTDLSPHLRYRFQLQATTKEGPGEAIVREGGTMALSGISDFGNISATAGENYSVVSWVPKEGQCNFRFHILFKALGEEKGGASLSPQYVSYNQSSYTQWDLQPDTDYEIHLFKERMFRHQMAVKTNGTGRVRLPPAGFATEGWFIGFVSAIILLLLVLLILCFIKRSKGGKYSVKDKEDTQVDSEARPMKDETFGEYSDNEEKAFGSSQPSLNGDIKPLGSDDSLADYGGSVDVQFNEDGSFIGQYSGKKEKEAAGGNDSSGATSPINPAVALE

SEQ ID NO: 90 - DNA, 1164 bp, Human
atggtgttcgcattttggaaggtctttctgatcctaagctgccttgcaggtcaggttagtgtggtgcaagtgaccatcccagacggtttcgtgaacgtgactgttggatctaatgtcactctcatctgcatctacaccaccactgtggcctcccgagaacagctttccatccagtggtctttcttccataagaaggagatggagccaatttctatttacttttctcaaggtggacaagctgtagccatcgggcaatttaaagatcgaattacagggtccaacgatccaggtaatgcatctatcactatctcgcatatgcagccagcagacagtggaatttacatctgcgatgttaacaaccccccagactttctcggccaaaaccaaggcatcctcaacgtcagtgtgttagtgaaaccttctaagcccctttgtagcgttcaaggaagaccagaaactggccacactatttccctttcctgtctctctgcgcttggaacaccttcccctgtgtactactggcataaacttgagggaagagacatcgtgccagtgaaagaaaacttcaacccaaccaccgggattttggtcattggaaatctgacaaattttgaacaaggttattaccagtgtactgccatcaacagacttggcaatagttcctgcgaaatcgatctcacttcttcacatccagaagttggaatcattgttggggccttgattggtagcctggtaggtgccgccatcatcatctctgttgtgtgcttcgcaaggaataaggcaaaagcaaaggcaaaagaaagaaattctaagaccatcgcggaacttgagccaatgacaaagataaacccaaggggagaaagcgaagcaatgccaagagaagacgctacccaactagaagtaactctaccatcttccattcatgagactggccctgataccatccaagaaccagactatgagccaaagcctactcaggagcctgccccagagcctgccccaggatcagagcctatggcagtgcctgaccttgacatcgagctggagctggagccagaaacgcagtcggaattggagccagagccagagccagagccagagtcagagcctggggttgtagttgagcccttaagtgaagatgaaaagggagtggttaaggcatag

SEQ ID NO: 91 - DNA, 516 bp, Human
atgtggacgctgaaatcgtccctggtcctgcttctgtgcctcacctgcagctatgcctttatgttctcttctctgagacagaaaactagcgaaccccaggggaaggtgccgtgtggagagcactttcggattcggcagaacctaccagagcacacccaaggctggcttgggagcaaatggctctggcttttgtttgctgttgtgccgtttgtgatactgcagtgtcaaagagacagtgagaagaataaggagcagagtcctcctggccttcgaggcttcccatttcgcactccactaaagaaaaatcaaaatgcttctctttacaaagactgtgtattcaataccttaaacgaacttgaagtggagcttttgaaatttgtgtccgaagtgcagaatcttaaaggtgccatggcaacaggcagtggcagtaacctcaagcttcgaaggtcagagatgcctgcagatccataccatgtcacaatctgtaaaatatggggagaagaaagctctagctga

SEQ ID NO: 92 - DNA, 1041 bp, Human
atggctcggcctgggcagcgttggctcggcaagtggcttgtggcgatggtcgtgtgggcgctgtgccggctcgccacaccgctggccaagaacctggagcccgtatcctggagctccctcaaccccaagttcctgagtgggaagggcttggtgatctatccgaaaattggagacaagctggacatcatctgcccccgagcagaagcagggcggccctatgagtactacaagctgtacctggtgcggcctgagcaggcagctgcctgtagcacagttctcgaccccaacgtgttggtcacctgcaataggccagagcaggaaatacgctttaccatcaagttccaggagttcagccccaactacatgggcctggagttcaagaagcaccatgattactacattacctcaacatccaatggaagcctggaggggctggaaaaccgggagggcggtgtgtgccgcacacgcaccatgaagatcatcatgaaggttgggcaagatcccaatgctgtgacgcctgagcagctgactaccagcaggcccagcaaggaggcagacaacactgtcaagatggccacacaggcccctggtagtcggggctccctgggtgactctgatggcaagcatgagactgtgaaccaggaagagaagagtggcccaggtgcaagtgggggcagcagcggggaccctgatggcttcttcaactccaaggtggcattgttcgcggctgtcggtgccggttgcgtcatcttcctgctcatcatcatcttcctgacggtcctactactgaagctacgcaagcggcaccgcaagcacacacagcagcgggcggctgccctctcgctcagtaccctggccagtcccaaggggggcagtggcacagcgggcaccgagcccagcgacatcatcattcccttacggactacagagaacaactactgcccccactatgagaaggtgagtggggactacgggcaccctgtctacatcgtccaagagatgccgccccagagcccggcgaacatctactacaaggtctga

SEQ ID NO: 93 - DNA, 4701 bp, Human
ccttcttcagcatcttccctgggcattgctgtgagtttaggccggcccgttttgagcaggagcagcagcggaacagtagacctgctggaggaagtggggctgcagatcagagacacagcattttcgtcaaccaaacttcttgaagccatatctacagtatcagctcaagtggaagagcttgccgtacatgaaatcaaaatggatccaagtatgggtgtgaattctgttaccatttctgttgagggtatgacttgcaattcctgtgtttggaccattgagcagcagattggaaaagtgaatggtgtgcatcacattaaggtatcactggaagaaaaaaatgcaactattatttatgaccctaaactacagactccaaagaccctacaggaagctattgatgacatgggctttgatgctgttatccataatcctgaccctctccctgttttaactgacaccttgtttctgactgttacggcgtcactgactttgccatgggaccatatccaaagcacattgctgaagaccaagggtgtgacagacattaaaatttaccctcagaaaagaactgtagcagtgacaataatcccttctatagtgaatgccaatcagataaaagagctggttccagaactcagtttagatactgggacactggagaaaaagtcaggagcttgtgaagatcatagtatggctcaagctggtgaagtcgtgctgaagatgaaagtggaagggatgacctgccattcatgtactagcactattgaaggaaaaattgggaaactgcaaggtgttcagcgaattaaagtctccctggacaatcaagaagctactattgtttatcaacctcatcttatctcagtagaggaaatgaaaaagcagattgaagctatgggctttccagcatttgtcaaaaagcagcccaagtacctcaaattgggagctattgatgtagaacgtctaaagaacacaccagttaaatcctcagaagggtcacagcaaaggagtccatcatataccaatgattcaacagccactttcatcattgatggcatgcattgtaaatcatgtgtgtcaaatattgaaagtactttatctgcactccaatatgtaagcagcatagtagtttctttagagaataggtctgccattgtgaagtataatgcaagctcagtcactccagaatccctgagaaaagcaatagaggctgtatcaccggggctatatagagttagtatcacaagtgaagttgagagtacctcaaactctccctccagctcatctcttcagaagattcctttgaatgtagttagccagcctctgacacaagaaactgtgataaacattgatggcatgacttgtaattcctgtgtgcagtctattgagggtgtcatatcaaaaaagccaggtgtaaaatccatacgagtctcccttgcaaatagcaatgggactgttgagtatgatcctctactaacctctccagaaacgttgagaggagcaatagaagacatgggatttgatgctaccttgtcagacacgaatgagccgttggtagtaatagctcagccttcatcggaaatgccgcttttgacttcaactaatgaattttatactaaagggatgacaccagttcaagacaaggaggaaggaaagaattcatctaagtgttacatacaggtcactggcatgacttgcgcttcctgtgtagcaaacattgaacggaatttaaggcgggaagaaggaatatattctatacttgtggccctgatggctggcaaggcagaagtaaggtataatcctgctgttatacaacccccaatgatagcagagttcatccgagaacttggatttggagccactgtgatagaaaatgctgatgaaggagatggtgttttggaacttgttgtgaggggaatgacgtgtgcctcctgcgtacataaaatagagtctagtctcacaaaacacagagggatcctatactgctccgtggccctggcaaccaacaaagcacatattaaatatgacccagaaattattggtcctagagatattatccatacaattgaaagcttaggttttgaagcttctttggtcaagaaggatcggtcagcaagtcacttagatcataaacgagaaataagacaatggagacggtcttttcttgtgagtctgtttttctgtattcctgtaatggggctgatgatatatatgatggttatggaccaccactttgcaactcttcaccataatcaaaacatgagtaaagaagaaatgatcaaccttcattcttctatgttcctggagcgccagattcttccaggattgtctgttatgaatttgctgtcctttttattgtgtgtacctctagaatttttcggaggctggtacttctacattcaggcttataaagcactgaagcataagacagcaaatatggacgtactgattgtgctggcaaccaccattgcatttgcctactctttgattattcttctagttgcaatgtatgagagagccaaagtgaaccctattactttctttgacacaccccctatgctgtttgtgtttattgcactaggccgatggctggaacatatagcaaagggcaaaacatcagaggctcttgcaaagttaatttcactacaagctacagaagcaactattgtaactcttgattctgataatatcctcctcagtgaagaacaagtggatgtggaacttgtacaacgtggagatatcattaaagtagttccaggaggcaaatttccagtggatggtcgtgttattgaaggacattctatggtagatgagtccctcatcacaggggaggcaatgcctgtggctaagaaacctggcagcacagtgattgctggttccattaaccagaacgggtcactgcttatctgcgcaacacatgttggagcagacacaaccctttctcaaattgtcaaacttgtggaagaggcacaaacatcaaaggctcctatccagcagtttgcagacaaactcagtggctattttgttccttttattgtttttgtttccattgccaccctcttggtatggattgtaattggatttctgaattttgaaattgtggaaacctactttcctggctacaatagaagtatctcccgaacagaaacgataatacgatttgctttccaagcctctatcacagttctgtgtattgcatgtccctgttcactgggactggccactccaactgctgtgatggtgggtacaggagtaggtgctcaaaatggcatactaataaaaggtggagagccattggagatggctcataaggtaaaggtagtggtatttgataagactggaaccattactcacggaaccccagtggtgaatcaagtaaaggttctaactgaaagtaacagaatatcacaccataaaatcttggccattgtgggaactgctgaaagtaacagtgaacaccctctaggaacagccataaccaaatattgcaaacaggagctggacactgaaaccttgggtacctgcatagatttccaggttgtgccaggctgtggtattagctgtaaagtcaccaatattgaaggcttgctacataagaataactggaatatagaggacaataatattaaaaatgcatccctggttcaaattgatgccagtaatgaacagtcatcaacttcgtcttccatgattattgatgcccagatctcaaatgctcttaatgctcagcagtataaagtcctcattggtaaccgggagtggatgattagaaatggtcttgtcattaataacgatgtaaatgatttcatgactgaacatgagagaaaaggtcggactgctgtattagtagcagttgatgatgagctgtgtggcttgatagccattgcagacacagtgaagcctgaagcagaactggctatccatattctgaaatctatgggcttagaagtagttctgatgactggagacaacagtaaaacagctagatctattgcttctcaggttggcattactaaggtgtttgctgaagttctaccttctcacaaggttgctaaagtgaagcaacttcaagaggaggggaaacgggtagcaatggtgggagatggaatcaatgactccccagctctggcaatggctaatgtgggaattgctattggcacaggcacagatgtagccattgaagcagctgatgtggttttgataaggaatgatcttctggatgtagtggcaagtattgacttatcaagagagacagtcaagaggattcggataaattttgtctttgctctaatttataatctggttggaattcccatagctgctggagtttttatgcccattggtttggttttgcagccctggatgggatctgcagcaatggctgcttcatctgtttctgtagtactttcttctctcttccttaaactttacaggaaaccaacttacgagagttatgaactgcctgcccggagccagataggacagaagagtccttcagaaatcagcgttcatgttggaatagatgatacctcaaggaattctcctaaactgggtttgctggaccggattgttaattatagcagagcctctataaactcactactgtctgataaacgctccctaaacagtgttgttaccagtgaacctgacaagcactcactcctggtgggagacttcagggaagatgatgacactgcattataa

SEQ ID NO: 94 - DNA, 516 bp, Human
atgtggacgctgaaatcgtccctggtcctgcttctgtgcctcacctgcagctatgcctttatgttctcttctctgagacagaaaactagcgaaccccaggggaaggtgcaatacggagagcactttcggattcggcagaatctaccagagcacacccaaggctggcttgggagcaaatggctctggcttctttttgttgttgtgccgtttgtgatactgcagtgtcaaagagacagtgagaagaataaggagcagagtcctcctggccttcgaggcttcccatttcgcactccactaaagaaaaatcaaaatgcttctctttacaaagactgtgtattcaataccttaaacgaacttgaagtggagcttttgaaatttgtgtccgaagtgcagaatcttaaaggtgccatggcaacaggcagtggcagtaacctcaagcttcgaaggtcagagatgcctgcagatccataccatgtcacaatctgtaaaatatggggagaagaaagctctagctga

SEQ ID NO: 95 - DNA, 1068 bp, Human
atgacaacctcactagatacagttgagacctttggtaccacatcctactatgatgacgtgggcctgctctgtgaaaaagctgataccagagcactgatggcccagtttgtgcccccgctgtactccctggtgttcactgtgggcctcttgggcaatgtggtggtggtgatgatcctcataaaatacaggaggctccgaattatgaccaacatctacctgctcaacctggccatttcggacctgctcttcctcgtcacccttccattctggatccactatgtcagggggcataactgggtttttggccatggcatgtgtaagctcctctcagggttttatcacacaggcttgtacagcgagatctttttcataatcctgctgacaatcgacaggtacctggccattgtccatgctgtgtttgcccttcgagcccggactgtcacttttggtgtcatcaccagcatcgtcacctggggcctggcagtgctagcagctcttcctgaatttatcttctatgagactgaagagttgtttgaagagactctttgcagtgctctttacccagaggatacagtatatagctggaggcatttccacactctgagaatgaccatcttctgtctcgttctccctctgctcgttatggccatctgctacacaggaatcatcaaaacgctgctgaggtgccccagtaaaaaaaagtacaaggccatccggctcatttttgtcatcatggcggtgtttttcattttctggacaccctacaatgtggctatccttctctcttcctatcaatccatcttatttggaaatgactgtgagcggagcaagcatctggacctggtcatgctggtgacagaggtgatcgcctactcccactgctgcatgaacccggtgatctacgcctttgttggagagaggttccggaagtacctgcgccacttcttccacaggcacttgctcatgcacctgggcagatacatcccattccttcctagtgagaagctggaaagaaccagctctgtctctccatccacagcagagccggaactctctattgtgttttag

SEQ ID NO: 96 - DNA, 1200 bp, Human
atggctcaaaggcagcctcactcacctaatcagactttaatttcaatcacaaatgacacagaatcatcaagctctgtggtttctaacgataacacaaataaaggatggagcggggacaactctccaggaatagaagcattgtgtgccatctatattacttatgctgtgatcatttcagtgggcatccttggaaatgctattctcatcaaagtctttttcaagaccaaatccatgcaaacagttccaaatattttcatcaccagcctggcttttggagatcttttacttctgctaacttgtgtgccagtggatgcaactcactaccttgcagaaggatggctgttcggaagaattggttgtaaggtgctctctttcatccggctcacttctgttggtgtgtcagtgttcacattaacaattctcagcgctgacagatacaaggcagttgtgaagccacttgagcgacagccctccaatgccatcctgaagacttgtgtaaaagctggctgcgtctggatcgtgtctatgatatttgctctacctgaggctatattttcaaatgtatacacttttcgagatcccaataaaaatatgacatttgaatcatgtacctcttatcctgtctctaagaagctcttgcaagaaatacattctctgctgtgcttcttagtgttctacattattccactctctattatctctgtctactattccttgattgctaggaccctttacaaaagcaccctgaacatacctactgaggaacaaagccatgcccgtaagcagattgaatcccgaaagagaattgccagaacggtattggtgttggtggctctgtttgccctctgctggttgccaaatcacctcctgtacctctaccattcattcacttctcaaacctatgtagacccctctgccatgcatttcattttcaccattttctctcgggttttggctttcagcaattcttgcgtaaacccctttgctctctactggctgagcaaaagcttccagaagcattttaaagctcagttgttctgttgcaaggcggagcggcctgagcctcctgttgctgacacctctcttaccaccctggctgtgatgggaacggtcccgggcactgggagcatacagatgtctgaaattagtgtgacctcgttcactgggtgtagtgtgaagcaggcagaggacagattctag

SEQ ID NO: 97 - DNA, 516 bp, Human
atgtggacgctgaaatcgtccctggtcctgcttctgtgcctcacctgcagctatgcctttatgttctcttctctgagacagaaaactagcgaaccccaggggaaggtgcaatacggagagcactttcggattcggcagaatctaccagagcacacccaaggctggcttgggagcaaatggctctggcttctttttgttgttgtgccgtttgtgatactgcagtgtcaaagagacagtgagaagaataaggagcagagtcctcctggccttcgaggcggccaacttcactctccattaaagaaaaaaagaaatgcttcccccaacaaagactgtgcattcaataccttaatggaactcgaggtggagcttatgaaatttgtgtccaaagtgcggaatcttaaacgtgccatggcaacaggtagtggcagtaacctcaggcttcgaaagtcagagatgcctgcagatccataccatgtcacgatctgtgaaatatggggagaagaaagctctagctga

SEQ ID NO: 98 - DNA, 654 bp, Human
atggcggagttcgacaccatctcggaactggaggaggaggaggaagaagaagcggcaacgtcgtcgtcgtcgccgtcgtcgtcgtcgtcggtatctgggcccgacgatgacgaggaggatgaggaggaagaggaggaagaggaggaggaggaagaagaggaggaggaggaagaggaggaggaagcgccgcccccgcctcgggtagtgagcgaggagcatctgcggagatatgctcccgaccctgtattagtgcggggtgccggccacatcactgtgtttggcttgagcaacaagtttgatactgaatttccctccgttctaacagggaaggtggccccagaagaatttaaaaccagcattggccgtgtgaatgcatgtttgaaaaaggctctcccggtcaatgtgaaatggctgctgtgtggttgtctctgctgctgttgcacactgggttgcagcctatggcctgttatttgtctcaacaaaagaaccagaagatcaattcagaagttaatagaatgggaaaataacagattatatcacaagcttgctttgcactggaagttgactaagaggaaatgtgaaactagcaatatgatggagtatgtaatactaatagaattcttaccaaaatatcccatattccgacctgactga

SEQ ID NO: 99 - DNA, 654 bp, Human; identical to SEQ ID NO: 98

SEQ ID NO: 100 - DNA, 4269 bp, Human
atggatccaagtatgggtgtgaattctgttaccatttctgttgagggtatgacttgcaattcctgtgtttggaccattgagcagcagattggaaaagtgaatggtgtgcatcacattaaggtatcactggaagaaaaaaatgcaactattatttatgaccctaaactacagactccaaagaccctacaggaagctattgatgacatgggctttgatgctgttatccataatcctgaccctctccctgttttaactgacaccttgtttctgactgttacggcgtcactgactttgccatgggaccatatccaaagcacattgctgaagaccaagggtgtgacagacattaaaatttaccctcagaaaagaactgtagcagtgacaataatcccttctatagtgaatgccaatcagataaaagagctggttccagaactcagtttagatactgggacactggagaaaaagtcaggagcttgtgaagatcatagtatggctcaagctggtgaagtcgtgctgaagatgaaagtggaagggatgacctgccattcatgtactagcactattgaaggaaaaattgggaaactgcaaggtgttcagcgaattaaagtctccctggacaatcaagaagctactattgtttatcaacctcatcttatctcagtagaggaaatgaaaaagcagattgaagctatgggctttccagcatttgtcaaaaagcagcccaagtacctcaaattgggagctattgatgtagaacgtctaaagaacacaccagttaaatcctcagaagggtcacagcaaaggagtccatcatataccaatgattcaacagccactttcatcattgatggcatgcattgtaaatcatgtgtgtcaaatattgaaagtactttatctgcactccaatatgtaagcagcatagtagtttctttagagaataggtctgccattgtgaagtataatgcaagctcagtcactccagaatccctgagaaaagcaatagaggctgtatcaccggggctatatagagttagtatcacaagtgaagttgagagtacctcaaactctccctccagctcatctcttcagaagattcctttgaatgtagttagccagcctctgacacaagaaactgtgataaacattgatggcatgacttgtaattcctgtgtgcagtctattgagggtgtcatatcaaaaaagccaggtgtaaaatccatacgagtctcccttgcaaatagcaatgggactgttgagtatgatcctctactaacctctccagaaacgttgagaggagcaatagaagacatgggatttgatgctaccttgtcagacacgaatgagccgttggtagtaatagctcagccttcatcggaaatgccgcttttgacttcaactaatgaattttatactaaagggatgacaccagttcaagacaaggaggaaggaaagaattcatctaagtgttacatacaggtcactggcatgacttgcgcttcctgtgtagcaaacattgaacggaatttaaggcgggaagaaggaatatattctatacttgtggccctgatggctggcaaggcagaagtaaggtataatcctgctgttatacaacccccaatgatagcagagttcatccgagaacttggatttggagccactgtgatagaaaatgctgatgaaggagatggtgttttggaacttgttgtgaggggaatgacgtgtgcctcctgcgtacataaaatagagtctagtctcacaaaacacagagggatcctatactgctccgtggccctggcaaccaacaaagcacatattaaatatgacccagaaattattggtcctagagatattatccatacaattgaaagcttaggttttgaagcttctttggtcaagaaggatcggtcagcaagtcacttagatcataaacgagaaataagacaatggagacggtcttttcttgtgagtctgtttttctgtattcctgtaatggggctgatgatatatatgatggttatggaccaccactttgcaactcttcaccataatcaaaacatgagtaaagaagaaatgatcaaccttcattcttctatgttcctggagcgccagattcttccaggattgtctgttatgaatttgctgtcctttttattgtgtgtacctctagaaggcaaaacatcagaggctcttgcaaagttaatttcactacaagctacagaagcaactattgtaactcttgattctgataatatcctcctcagtgaagaacaagtggatgtggaacttgtacaacgtggagatatcattaaagtagttccaggaggcaaatttccagtggatggtcgtgttattgaaggacattctatggtagatgagtccctcatcacaggggaggcaatgcctgtggctaagaaacctggcagcacagtgattgctggttccattaaccagaacgggtcactgcttatctgcgcaacacatgttggagcagacacaaccctttctcaaattgtcaaacttgtggaagaggcacaaacatcaaaggctcctatccagcagtttgcagacaaactcagtggctattttgttccttttattgtttttgtttccattgccaccctcttggtatggattgtaattggatttctgaattttgaaattgtggaaacctactttcctggctacaatagaagtatctcccgaacagaaacgataatacgatttgctttccaagcctctatcacagttctgtgtattgcatgtccctgttcactgggactggccactccaactgctgtgatggtgggtacaggagtaggtgctcaaaatggcatactaataaaaggtggagagccattggagatggctcataaggtaaaggtagtggtatttgataagactggaaccattactcacggaaccccagtggtgaatcaagtaaaggttctaactgaaagtaacagaatatcacaccataaaatcttggccattgtgggaactgctgaaagtaacagtgaacaccctctaggaacagccataaccaaatattgcaaacaggagctggacactgaaaccttgggtacctgcatagatttccaggttgtgccaggctgtggtattagctgtaaagtcaccaatattgaaggcttgctacataagaataactggaatatagaggacaataatattaaaaatgcatccctggttcaaattgatgccagtaatgaacagtcatcaacttcgtcttccatgattattgatgcccagatctcaaatgctcttaatgctcagcagtataaagtcctcattggtaaccgggagtggatgattagaaatggtcttgtcattaataacgatgtaaatgatttcatgactgaacatgagagaaaaggtcggactgctgtattagtagcagttgatgatgagctgtgtggcttgatagccattgcagacacagtgaagcctgaagcagaactggctatccatattctgaaatctatgggcttagaagtagttctgatgactggagacaacagtaaaacagctagatctattgcttctcaggttggcattactaaggtgtttgctgaagttctaccttctcacaaggttgctaaagtgaagcaacttcaagaggaggggaaacgggtagcaatggtgggagatggaatcaatgactccccagctctggcaatggctaatgtgggaattgctattggcacaggcacagatgtagccattgaagcagctgatgtggttttgataaggaatgatcttctggatgtagtggcaagtattgacttatcaagagagacagtcaagaggattcggataaattttgtctttgctctaatttataatctggttggaattcccatagctgctggagtttttatgcccattggtttggttttgcagccctggatgggatctgcagcaatggctgcttcatctgtttctgtagtactttcttctctcttccttaaactttacaggaaaccaacttacgagagttatgaactgcctgcccggagccagataggacagaagagtccttcagaaatcagcgttcatgttggaatagatgatacctcaaggaattctcctaaactgggtttgctggaccggattgttaattatagcagagcctctataaactcactactgtctgataaacgctccctaaacagtgttgttaccagtgaacctgacaagcactcactcctggtgggagacttcagggaagatgatgacactgcattataa

SEQ ID NO: 101 - DNA, 1512 bp, Human
atggatccaagtatgggtgtgaattctgttaccatttctgttgagggtatgacttgcaattcctgtgtttggaccattgagcagcagattggaaaagtgaatggtgtgcatcacattaaggtaaaggtagtggtatttgataagactggaaccattactcacggaaccccagtggtgaatcaagtaaaggttctaactgaaagtaacagaatatcacaccataaaatcttggccattgtgggaactgctgaaagtaacagtgaacaccctctaggaacagccataaccaaatattgcaaacaggagctggacactgaaaccttgggtacctgcatagatttccaggttgtgccaggctgtggtattagctgtaaagtcaccaatattgaaggcttgctacataagaataactggaatatagaggacaataatattaaaaatgcatccctggttcaaattgatgccagtaatgaacagtcatcaacttcgtcttccatgattattgatgcccagatctcaaatgctcttaatgctcagcagtataaagtcctcattggtaaccgggagtggatgattagaaatggtcttgtcattaataacgatgtaaatgatttcatgactgaacatgagagaaaaggtcggactgctgtattagtagcagttgatgatgagctgtgtggcttgatagccattgcagacacagtgaagcctgaagcagaactggctatccatattctgaaatctatgggcttagaagtagttctgatgactggagacaacagtaaaacagctagatctattgcttctcaggttggcattactaaggtgtttgctgaagttctaccttctcacaaggttgctaaagtgaagcaacttcaagaggaggggaaacgggtagcaatggtgggagatggaatcaatgactccccagctctggcaatggctaatgtgggaattgctattggcacaggcacagatgtagccattgaagcagctgatgtggttttgataaggaatgatcttctggatgtagtggcaagtattgacttatcaagagagacagtcaagaggattcggataaattttgtctttgctctaatttataatctggttggaattcccatagctgctggagtttttatgcccattggtttggttttgcagccctggatgggatctgcagcaatggctgcttcatctgtttctgtagtactttcttctctcttccttaaactttacaggaaaccaacttacgagagttatgaactgcctgcccggagccagataggacagaagagtccttcagaaatcagcgttcatgttggaatagatgatacctcaaggaattctcctaaactgggtttgctggaccggattgttaattatagcagagcctctataaactcactactgtctgataaacgctccctaaacagtgttgttaccagtgaacctgacaagcactcactcctggtgggagacttcagggaagatgatgacactgcattataa

SEQ ID NO: 102 - DNA, 1053 bp, Human
atggctgtgtttgtcgtgctcctggcgttggtggcgggtgttttggggaacgagtttagtatattaaaatcaccagggtctgttgttttccgaaatggaaattggcctataccaggagagcggatcccagacgtggctgcattgtccatgggcttctctgtgaaagaagacctttcttggccaggactcgcagtgggtaacctgtttcatcgtcctcgggctaccgtcatggtgatggtgaagggagtgaacaaactggctctacccccaggcagtgtcatttcgtaccctttggagaatgcagttccttttagtcttgacagtgttgcaaattccattcactccttattttctgaggaaactcctgttgttttgcagttggctcccagtgaggaaagagtgtatatggtagggaaggcaaactcagtgtttgaagacctttcagtcaccttgcgccagctccgtaatcgcctgtttcaagaaaactctgttctcagttcactccccctcaattctctgagtaggaacaatgaagttgacctgctctttctttctgaactgcaagtgctacatgatatttcaagcttgctgtctcgtcataagcatctagccaaggatcattctcctgatttatattcactggagctggcaggtttggatgaaattgggaagcgttatggggaagactctgaacaattcagagatgcttctaagatccttgttgacgctctgcaaaagtttgcagatgacatgtacagtctttatggtgggaatgcagtggtagagttagtcactgtcaagtcatttgacacctccctcattaggaagacaaggactatccttgaggcaaaacaagcgaagaacccagcaagtccctataaccttgcatataagtataattttgaatattccgtggttttcaacatggtactttggataatgatcgccttggccttggctgtgattatcacctcttacaatatttggaacatggatcctggatatgatagcatcatttataggatgacaaaccagaagattcgaatggattga

SEQ ID NO: 103 - DNA, 1335 bp, Human
atgaaattcccggcctcggtgctggcgtccgtgttcctgttcgtggccgagacaacggcggcgctcagcctgagcagcacctaccgctcgggcggggaccgcatgtggcaggcgctgacgttgcttttctcgctactgccttgcgcgctcgtgcagctcacgcttctcttcgtacaccgcgacctcagccgcgaccgcccgctcgtactgctgctgcacctgctgcaacttgggccccttttcaggtgttttgaagtcttctgcatctactttcagtcaggcaacaatgaagagccttatgtcagtatcaccaagaagaggcaaatgccaaaaaatggcctctcagaggagattgagaaggaggtgggccaggcagaaggcaaactaatcacccaccgatcagcgttcagccgggcgtcggtgatccaggctttcttgggctcagccccccagctgaccctacagctgtacataagtgtcatgcagcaggacgtcactgttggaagaagtctcctcatgaccatatccctgttgtccattgtgtatggagccttgcgctgcaacatcctagccatcaaaatcaagtacgatgagtatgaagtcaaagtgaagcctctggcctatgtctgtatcttcctgtggaggagctttgagattgccactcgagttgtagtcctggtcctctttacctccgtcctgaagacctgggtggtggttataatactcatcaacttcttcagtttcttcttgtacccctggatcctcttctggtgcagtggttccccattccctgagaacatagagaaggccctcagtagagtgggcaccaccattgtactatgctttctaactttactctatactggtatcaacatgttctgctggtctgctgtacagctgaaaattgacagccctgacctcatcagcaagtcccataattggtaccagctactggtgtattacatgataagattcatcgagaatgccatcctcctcctcctgtggtatcttttcaagactgacatctatatgtatgtgtgcgcacctctgttggtcctgcagctgctcattgggtactgcacagccattctcttcatgcttgtattctatcagttcttccacccttgcaaaaagctcttttcttccagtgtttctgaaggctttcagaggtggctcaggtgtttttgctgggcctgcaggcagcaaaaaccctgtgagccgataggaaaggaagatctacagtcatccagagatagagatgagacaccttctagcagtaaaacaagtcctgagcctggtcagttcttgaatgctgaagatctctgctctgcttaa

SEQ ID NO: 104 - DNA, 642 bp, Human
gccaccatggtctggttctgcaacagtgccgactgccaattttcagtcttcgcccttaccaccataggatggatcctctcctctacgtccacgggcctcgtggagtggcgaatatggtacatgaaagacacctcgctctacccccctggaatcgcctgcgtgggaatatttagagtctgcatttaccggcgtcgcaccaacagcaccacaaccaaattttgttaccgatacagctaccaggacacctttctcccttttgaaatttccatggctcaacgcttcctactgactgccagcattttcggattcttcgggagagcctttaacatgtttgcacttagaaacatgtccatgagaatgtttgaggaggacacctacaattcattcgttgtttcaggaattctcaacattgctgctggtgtctttaacttaattgctgtgctccagaactacgatgccgtcataaactcacaggggatcaccttcctgccatctctccaaatgcccttcaagccagatgtgcaggaagttggcactgccattcaagtggcagggataggtgtcttgccgatgctgttaactgggatgttttctctgttttacaaatgtccccccatgctctaccaaatatttccaacgact

SEQ ID NO: 105 - DNA, 588 bp, Human
atggctgccgaggatgtggtggcgactggcgccgacccaagcgatctggagagcggcgggctgctgcatgagattttcacgtcgccgctcaacctgctgctgcttggcctctgcatcttcctgctctacaagatcgtgcgcggggaccagccggcggccagcggcgacagcgacgacgacgagccgccccctctgccccgcctcaagcggcgcgacttcacccccgccgagctgcggcgcttcgacggcgtccaggacccgcgcatactcatggccatcaacggcaaggtgttcgatgtgaccaaaggccgcaaattctacgggcccgaggggccgtatggggtctttgctggaagagatgcatccaggggccttgccacattttgcctggataaggaagcactgaaggatgagtacgatgacctttctgacctcactgctgcccagcaggagactctgagtgactgggagtctcagttcactttcaagtatcatcacgtgggcaaactgctgaaggagggggaggagcccactgtgtactcagatgaggaagaaccaaaagatgagagtgcccggaaaaatgattaa

SEQ ID NO: 106 - DNA, 267 bp, Human
caggaatgtaatgaggaaatcaaaatggatccaagtatgggtgtgaattctgttaccatttctgttgagggtatgacttgcaattcctgtgtttggaccattgagcagcagattggaaaagtgaatggtgtgcatcacattaaggtaatttctttagagaataggtctgccattgtgaatttttatgcccattggtttggttttgcagccctggatgggatctgcagcaatggctgcttcatctgtttctgtagtactttcttctct

SEQ ID NO: 107 - DNA, 1164 bp, Human
atgagagaacccctggaggcgtttaagttggcagacttggatttcaggaagagctctctggcttctgggtggagaatggccagtggggccttcaccatggatcagttccctgaatcagtgacagaaaactttgagtacgatgatttggctgaggcctgttatattggggacatcgtggtctttgggactgtgttcctgtccatattctactccgtcatctttgccattggcctggtgggaaatttgttggtagtgtttgccctcaccaacagcaagaagcccaagagtgtcaccgacatttacctcctgaacctggccttgtctgatctgctgtttgtagccactttgcccttctggactcactatttgataaatgaaaagggcctccacaatgccatgtgcaaattcactaccgccttcttcttcatcggcttttttggaagcatattcttcatcaccgtcatcagcattgataggtacctggccatcgtcctggccgccaactccatgaacaaccggaccgtgcagcatggcgtcaccatcagcctaggcgtctgggcagcagccattttggtggcagcaccccagttcatgttcacaaagcagaaagaaaatgaatgccttggtgactaccccgaggtcctccaggaaatctggcccgtgctccgcaatgtggaaacaaattttcttggcttcctactccccctgctcattatgagttattgctacttcagaatcatccagacgctgttttcctgcaagaaccacaagaaagccaaagccattaaactgatccttctggtggtcatcgtgtttttcctcttctggacaccctacaacgttatgattttcctggagacgcttaagctctatgacttctttcccagttgtgacatgaggaaggatctgaggctggccctcagtgtgactgagacggttgcatttagccattgttgcctgaatcctctcatctatgcatttgctggggagaagttcagaagatacctttaccacctgtatgggaaatgcctggctgtcctgtgtgggcgctcagtccacgttgatttctcctcatctgaatcacaaaggagcaggcatggaagtgttctgagcagcaattttacttaccacacgagtgatggagatgcattgctccttctctga

SEQ ID NO: 108 - DNA, 1107 bp, Human
atggtccttgaggtgagtgaccaccaagtgctaaatgacgccgaggttgccgccctcctggagaacttcagctcttcctatgactatggagaaaacgagagtgactcgtgctgtacctccccgccctgcccacaggacttcagcctgaacttcgaccgggccttcctgccagccctctacagcctcctctttctgctggggctgctgggcaacggcgcggtggcagccgtgctgctgagccggcggacagccctgagcagcaccgacaccttcctgctccacctagctgtagcagacacgctgctggtgctgacactgccgctctgggcagtggacgctgccgtccagtgggtctttggctctggcctctgcaaagtggcaggtgccctcttcaacatcaacttctacgcaggagccctcctgctggcctgcatcagctttgaccgctacctgaacatagttcatgccacccagctctaccgccgggggcccccggcccgcgtgaccctcacctgcctggctgtctgggggctctgcctgcttttcgccctcccagacttcatcttcctgtcggcccaccacgacgagcgcctcaacgccacccactgccaatacaacttcccacaggtgggccgcacggctctgcgggtgctgcagctggtggctggctttctgctgcccctgctggtcatggcctactgctatgcccacatcctggccgtgctgctggtttccaggggccagcggcgcctgcgggccatgcggctggtggtggtggtcgtggtggcctttgccctctgctggaccccctatcacctggtggtgctggtggacatcctcatggacctgggcgctttggcccgcaactgtggccgagaaagcagggtagacgtggccaagtcggtcacctcaggcctgggctacatgcactgctgcctcaacccgctgctctatgcctttgtaggggtcaagttccgggagcggatgtggatgctgctcttgcgcctgggctgccccaaccagagagggctccagaggcagccatcgtcttcccgccgggattcatcctggtctgagacctcagaggcctcctactcgggcttgtga

SEQ ID NO: 109 - DNA, 801 bp, Human
atggtccttgaggtgagtgaccaccaagtgctaaatgacgccgaggttgccgccctcctggagaacttcagctcttcctatgactatggagaaaacgagagtgactcgtgctgtacctccccgccctgcccacaggacttcagcctgaacttcgaccgggccttcctgccagccctctacagcctcctctttctgctggggctgctgggcaacggcgcggtggcagccgtgctgctgagccggcggacagccctgagcagcaccgacaccttcctgctccacctagctgtagcagacacgctgctggtgctgacactgccgctctgggcagtggacgctgccgtccagtgggtctttggctctggcctctgcaaagtggcaggtgccctcttcaacatcaacttctacgcaggagccctcctgctggcctgcatcagctttgaccgctacctgaacatagttcatgccacccagctctaccgccgggggcccccggcccgcgtgaccctcacctgcctggctgtctgggggctctgcctgcttttcgccctcccagacttcatcttcctgtcggcccaccacgacgagcgcctcaacgccacccactgccaatacaacttcccacaggggtcaagttccgggagcggatgtggatgctgctcttgcgcctgggctgccccaaccagagagggctccagaggcagccatcgtcttcccgccgggattcatcctggtctgagacctcagaggcctcctactcgggcttgtgaggccggaatccgggctcccctttcgcccaca

SEQ ID NO: 110 - DNA, 4503 bp, Human
atggatccaagtatgggtgtgaattctgttaccatttctgttgagggtatgacttgcaattcctgtgtttggaccattgagcagcagattggaaaagtgaatggtgtgcatcacattaaggtatcactggaagaaaaaaatgcaactattatttatgaccctaaactacagactccaaagaccctacaggaagctattgatgacatgggctttgatgctgttatccataatcctgaccctctccctgttttaactgacaccttgtttctgactgttacggcgtcactgactttgccatgggaccatatccaaagcacattgctgaagaccaagggtgtgacagacattaaaatttaccctcagaaaagaactgtagcagtgacaataatcccttctatagtgaatgccaatcagataaaagagctggttccagaactcagtttagatactgggacactggagaaaaagtcaggagcttgtgaagatcatagtatggctcaagctggtgaagtcgtgctgaagatgaaagtggaagggatgacctgccattcatgtactagcactattgaaggaaaaattgggaaactgcaaggtgttcagcgaattaaagtctccctggacaatcaagaagctactattgtttatcaacctcatcttatctcagtagaggaaatgaaaaagcagattgaagctatgggctttccagcatttgtcaaaaagcagcccaagtacctcaaattgggagctattgatgtagaacgtctaaagaacacaccagttaaatcctcagaagggtcacagcaaaggagtccatcatataccaatgattcaacagccactttcatcattgatggcatgcattgtaaatcatgtgtgtcaaatattgaaagtactttatctgcactccaatatgtaagcagcatagtagtttctttagagaataggtctgccattgtgaagtataatgcaagctcagtcactccagaatccctgagaaaagcaatagaggctgtatcaccggggctatatagagttagtatcacaagtgaagttgagagtacctcaaactctccctccagctcatctcttcagaagattcctttgaatgtagttagccagcctctgacacaagaaactgtgataaacattgatggcatgacttgtaattcctgtgtgcagtctattgagggtgtcatatcaaaaaagccaggtgtaaaatccatacgagtctcccttgcaaatagcaatgggactgttgagtatgatcctctactaacctctccagaaacgttgagaggagcaatagaagacatgggatttgatgctaccttgtcagacacgaatgagccgttggtagtaatagctcagccttcatcggaaatgccgcttttgacttcaactaatgaattttatactaaagggatgacaccagttcaagacaaggaggaaggaaagaattcatctaagtgttacatacaggtcactggcatgacttgcgcttcctgtgtagcaaacattgaacggaatttaaggcgggaagaaggaatatattctatacttgtggccctgatggctggcaaggcagaagtaaggtataatcctgctgttatacaacccccaatgatagcagagttcatccgagaacttggatttggagccactgtgatagaaaatgctgatgaaggagatggtgttttggaacttgttgtgaggggaatgacgtgtgcctcctgcgtacataaaatagagtctagtctcacaaaacacagagggatcctatactgctccgtggccctggcaaccaacaaagcacatattaaatatgacccagaaattattggtcctagagatattatccatacaattgaaagcttaggttttgaagcttctttggtcaagaaggatcggtcagcaagtcacttagatcataaacgagaaataagacaatggagacggtcttttcttgtgagtctgtttttctgtattcctgtaatggggctgatgatatatatgatggttatggaccaccactttgcaactcttcaccataatcaaaacatgagtaaagaagaaatgatcaaccttcattcttctatgttcctggagcgccagattcttccaggattgtctgttatgaatttgctgtcctttttattgtgtgtacctgtacagtttttcggaggctggtacttctacattcaggcttataaagcactgaagcataagacagcaaatatggacgtactgattgtgctggcaaccaccattgcatttgcctactctttgattattcttctagttgcaatgtatgagagagccaaagtgaaccctattactttctttgacacaccccctatgctgtttgtgtttattgcactaggccgatggctggaacatatagcaaagggcaaaacatcagaggctcttgcaaagttaatttcactacaagctacagaagcaactattgtaactcttgattctgataatatcctcctcagtgaagaacaagtggatgtggaacttgtacaacgtggagatatcattaaagtagttccaggaggcaaatttccagtggatggtcgtgttattgaaggacattctatggtagatgagtccctcatcacaggggaggcaatgcctgtggctaagaaacctggcagcacagtgattgctggttccattaaccagaacgggtcactgcttatctgcgcaacacatgttggagcagacacaaccctttctcaaattgtcaaacttgtggaagaggcacaaacatcaaaggctcctatccagcagtttgcagacaaactcagtggctattttgttccttttattgtttttgtttccattgccaccctcttggtatggattgtaattggatttctgaattttgaaattgtggaaacctactttcctggctacaatagaagtatctcccgaacagaaacgataatacgatttgctttccaagcctctatcacagttctgtgtattgcatgtccctgttcactgggactggccactccaactgctgtgatggtgggtacaggagtaggtgctcaaaatggcatactaataaaaggtggagagccattggagatggctcataaggtaaaggtagtggtatttgataagactggaaccattactcacggaaccccagtggtgaatcaagtaaaggttctaactgaaagtaacagaatatcacaccataaaatcttggccattgtgggaactgctgaaagtaacagtgaacaccctctaggaacagccataaccaaatattgcaaacaggagctggacactgaaaccttgggtacctgcatagatttccaggttgtgccaggctgtggtattagctgtaaagtcaccaatattgaaggcttgctacataagaataactggaatatagaggacaataatattaaaaatgcatccctggttcaaattgatgccagtaatgaacagtcatcaacttcgtcttccatgattattgatgcccagatctcaaatgctcttaatgctcagcagtataaagtcctcattggtaaccgggagtggatgattagaaatggtcttgtcattaataacgatgtaaatgatttcatgactgaacatgagagaaaaggtcggactgctgtattagtagcagttgatgatgagctgtgtggcttgatagccattgcagacacagtgaagcctgaagcagaactggctatccatattctgaaatctatgggcttagaagtagttctgatgactggagacaacagtaaaacagctagatctattgcttctcaggttggcattactaaggtgtttgctgaagttctaccttctcacaaggttgctaaagtgaagcaacttcaagaggaggggaaacgggtagcaatggtgggagatggaatcaatgactccccagctctggcaatggctaatgtgggaattgctattggcacaggcacagatgtagccattgaagcagctgatgtggttttgataaggaatgatcttctggatgtagtggcaagtattgacttatcaagagagacagtcaagaggattcggataaattttgtctttgctctaatttataatctggttggaattcccatagctgctggagtttttatgcccattggtttggttttgcagccctggatgggatctgcagcaatggctgcttcatctgtttctgtagtactttcttctctcttccttaaactttacaggaaaccaacttacgagagttatgaactgcctgcccggagccagataggacagaagagtccttcagaaatcagcgttcatgttggaatagatgatacctcaaggaattctcctaaactgggtttgctggaccggattgttaattatagcagagcctctataaactcactactgtctgataaacgctccctaaacagtgttgttaccagtgaacctgacaagcactcactcctggtgggagacttcagggaagatgatgacactgcattataa

SEQ ID NO: 111 - DNA, 3342 bp, Human
atgttccgccggagcttgaatcgtttttgtgctggagaagagaaacgagttggcacacgcacagtgtttgttggcaatcatccagtttcggaaacagaagcttacattgcacaaagattttgtgataatagaatagtctcatctaagtatacactttggaattttctcccaaagaatctgtttgaacagtttagaagaattgcaaatttttattttctcataatcttccttgtacaggtcacagtagacacaccaactagcccagttaccagtggacttccacttttctttgttataactgttacagccatcaagcagggatatgaggattgtctgagacacagagctgacaatgaagtcaacaaaagcactgtttacattattgaaaatgcaaagcgagtgagaaaagaaagtgaaaaaatcaaggttggtgatgtagtagaagtacaggcagatgaaacctttccctgtgatcttattcttctatcatcttgcaccactgatggaacctgttatgtcactacagccagtcttgatggggaatccaattgcaagacacattatgcagtacgtgataccattgcactgtgtacagcagaatccatcgataccctccgagcagcaattgaatgtgaacagcctcaacctgacctctacaaatttgttgggcgaatcaatatctacagtaatagtcttgaggctgttgccaggtctttgggacctgaaaatctcttgctgaaaggagctacgctaaaaaataccgagaagatatatggagttgctgtttacactggaatggaaaccaaaatggctttgaactaccaagggaaatctcagaaacgttctgctgttgaaaaatctattaatgctttcctgattgtatatttatttatcttactgaccaaagctgcagtatgcactactctaaagtatgtttggcaaagtaccccatacaatgatgaaccttggtataaccaaaagactcagaaagagcgagagaccttgaaggttttaaaaatgttcaccgacttcctatcatttatggttctattcaactttatcattcctgtctccatgtacgtcacagtagaaatgcagaaattcttgggctccttcttcatctcatgggataaggacttttatgatgaagaaattaatgaaggagccctggttaacacatcagaccttaatgaagaacttggtcaggtggattatgtatttacagataagactggaacactcactgaaaacagcatggaattcattgaatgctgcatagatggccacaaatataaaggtgtaactcaagaggttgatggattatctcaaactgatggaactttaacatattttgacaaagtagataagaatcgagaagagctgtttctacgtgccttgtgtttatgtcatactgtagaaatcaaaacaaacgatgctgttgatggagctacagaatcagctgaattaacctatatctcctcttcaccagatgaaatagctttggtgaaaggagctaaaaggtacgggttcacatttttaggaaatcgaaatggatatatgagagtagagaaccaaagaaaagaaatagaagaatatgaacttcttcacaccttaaactttgatgctgtccggcgacgtatgagtgtaattgtgaagactcaagaaggagacatacttctcttttgtaaaggagcagactcggcagtttttcccagagtgcaaaatcatgaaattgagttaactaaagtccatgtggaacgtaatgcaatggatgggtatcggacactctgtgtagccttcaaagaaattgctccagatgattatgaaagaattaacagacagctcatagaggcaaaaatggccttacaagacagagaagaaaaaatggaaaaagttttcgatgatattgagacaaacatgaatttaattggagccactgcagttgaagacaagctacaagatcaagctgcagagaccattgaagctctgcatgcagcaggcctgaaagtctgggtgctcactggggacaagatggagacagctaaatccacatgctatgcctgccgccttttccagaccaacactgagctcttagaactaaccacaaaaaccattgaagaaagtgaaaggaaagaagatcgattacatgaattattgatagaatatcgcaagaaattgctgcatgagtttcctaaaagtactagaagctttaaaaaagcatggacagaacatcaggaatatggattaatcatagatggctccacattgtcactcatactaaattctagtcaagactctagttcaaacaattacaaaagcattttcctacaaatatgtatgaagtgtactgcagtgctctgctgtcggatggcaccattacagaaagcccagattgtcagaatggtgaagaatttaaaaggcagcccaataactctgtcgataggtgatggtgccaatgatgttagtatgatcttggaatcccatgtgggaataggcaaagaaggtcgccaagcagctaggaatagcgattattctgttccaaagtttaaacacttaaagaaactgctgttggctcatggacatctatattatgtgagaatagcacaccttgtacagtacttcttctataagaacctttgtttcattttgccacagtttttgtaccagttcttctgtggattctcacaacagccactgtatgatgctgcttaccttacaatgtacaatatctgcttcacatccttgcccatcctggcctatagtctactggaacagcacatcaacattgacactctgacctcagatccccgattgtatatgaaaatttctggcaatgccatgctacagttgggccccttcttatattggacatttctggctgcctttgaagggacagtgttcttctttgggacttactttctttttcagactgcatccctagaagaaaatggaaaggtatacggaaactggacttttggaaccattgtttttacagtcttagtattcactgtaaccctgaagcttgccttggatacccgattctggacgtggataaatcactttgtgatttggggttctttagccttctatgtatttttctcattcttctggggaggaattatttggccttttctcaagcaacagagaatgtattttgtatttgcccaaatgctgtcttctgtatccacatggttggctataattcttctaatatttatcagcctgttccctgagattcttctgatagtattaaagaatgtaagaagaagaagtgccaggaatccgaatcttgaactgcctatgttattgtcctacaagcatactgacagtggttacagctaa

SEQ ID NO: 112 - DNA, 1248 bp, Human
atggagttgaggaagtacggccctggaagactggcggggacagttataggaggagctgctcagagtaaatcacagactaaatcagactcaatcacaaaagagttcctgccaggcctttacacagccccttcctccccgttcccgccctcacaggtgagtgaccaccaagtgctaaatgacgccgaggttgccgccctcctggagaacttcagctcttcctatgactatggagaaaacgagagtgactcgtgctgtacctccccgccctgcccacaggacttcagcctgaacttcgaccgggccttcctgccagccctctacagcctcctctttctgctggggctgctgggcaacggcgcggtggcagccgtgctgctgagccggcggacagccctgagcagcaccgacaccttcctgctccacctagctgtagcagacacgctgctggtgctgacactgccgctctgggcagtggacgctgccgtccagtgggtctttggctctggcctctgcaaagtggcaggtgccctcttcaacatcaacttctacgcaggagccctcctgctggcctgcatcagctttgaccgctacctgaacatagttcatgccacccagctctaccgccgggggcccccggcccgcgtgaccctcacctgcctggctgtctgggggctctgcctgcttttcgccctcccagacttcatcttcctgtcggcccaccacgacgagcgcctcaacgccacccactgccaatacaacttcccacaggtgggccgcacggctctgcgggtgctgcagctggtggctggctttctgctgcccctgctggtcatggcctactgctatgcccacatcctggccgtgctgctggtttccaggggccagcggcgcctgcgggccatgcggctggtggtggtggtcgtggtggcctttgccctctgctggaccccctatcacctggtggtgctggtggacatcctcatggacctgggcgctttggcccgcaactgtggccgagaaagcagggtagacgtggccaagtcggtcacctcaggcctgggctacatgcactgctgcctcaacccgctgctctatgcctttgtaggggtcaagttccgggagcggatgtggatgctgctcttgcgcctgggctgccccaaccagagagggctccagaggcagccatcgtcttcccgccgggattcatcctggtctgagacctcagaggcctcctactcgggcttgtga

SEQ ID NO: 113 - DNA, 768 bp, Human
atgtcttcacataggaggaaagcgaaggggaggaataggagaagtcaccgtgccatgcgtgtggctcacttagagctggcaacttatgagttggcggcaactgagtcgaatcccgagagcagccatcctggatacgaggccgccatggctgacaggcctcagccaggatggcgggaatctctaaagatgcgggtcagcaaaccctttgggatgctcatgctctccatttggatcctgctgttcgtgtgctactacctgtcctactacctgtgctccgggtcctcatattttgtgcttgcaaatggacatatcctgcccaacagtgaaaatgctcatggccaatctctggaagaagattccgcattggaagctttgctgaattttttctttccaacaacttgcaatctgagggaaaatcaggtggcaaagccttgtaatgagctgcaagatcttagtgagagtgaatgtttgagacacaaatgctgtttttcatcatcggggaccacgagcttcaaatgttttgctccatttagagatgtgcctaaacagatgatgcaaatgtttgggcttggtgcgatcagccttatcctggtatgtctgcccatttattgccgctctcttttctggaggagcgaaccggccgatgatttacaaaggcaggacaacagagttgtaacgggtttgaagaaacaaagaaggaagcgaaagaggaagtctgaaatgttacagaaagcagcaagaggacgtgaggaacatggtgacgagtag

SEQ ID NO: 114 - DNA, 3387 bp, Human
atgcagatggtcccatctctccctccagcctctgagtgtgctggagaagagaaacgagttggcacacgcacagtgtttgttggcaatcatccagtttcggaaacagaagcttacattgcacaaagattttgtgataatagaatagtctcatctaagtatacactttggaattttctcccaaagaatctgtttgaacagtttagaagaattgcaaatttttattttctcataatcttccttgtacaggtcacagtagacacaccaactagcccagttaccagtggacttccacttttctttgttataactgttacagccatcaagcagggatatgaggattgtctgagacacagagctgacaatgaagtcaacaaaagcactgtttacattattgaaaatgcaaagcgagtgagaaaagaaagtgaaaaaatcaaggttggtgatgtagtagaagtacaggcagatgaaacctttccctgtgatcttattcttctatcatcttgcaccactgatggaacctgttatgtcactacagccagtcttgatggggaatccaattgcaagacacattatgcagtacgtgataccattgcactgtgtacagcagaatccatcgataccctccgagcagcaattgaatgtgaacagcctcaacctgacctctacaaatttgttgggcgaatcaatatctacagtaatagtcttgaggctgttgccaggtctttgggacctgaaaatctcttgctgaaaggagctacgctaaaaaataccgagaagatatatggagttgctgtttacactggaatggaaaccaaaatggctttgaactaccaagggaaatctcagaaacgttctgctgttgaaaaatctattaatgctttcctgattgtatatttatttatcttactgaccaaagctgcagtatgcactactctaaagtatgtttggcaaagtaccccatacaatgatgaaccttggtataaccaaaagactcagaaagagcgagagaccttgaaggttttaaaaatgttcaccgacttcctatcatttatggttctattcaactttatcattcctgtctccatgtacgtcacagtagaaatgcagaaattcttgggctccttcttcatctcatgggataaggacttttatgatgaagaaattaatgaaggagccctggttaacacatcagaccttaatgaagaacttggtcaggtggattatgtatttacagataagactggaacactcactgaaaacagcatggaattcattgaatgctgcatagatggccacaaatataaaggtgtaactcaagaggttgatggattatctcaaactgatggaactttaacatattttgacaaagtagataagaatcgagaagagctgtttctacgtgccttgtgtttatgtcatactgtagaaatcaaaacaaacgatgctgttgatggagctacagaatcagctgaattaacctatatctcctcttcaccagatgaaatagctttggtgaaaggagctaaaaggtacgggttcacatttttaggaaatcgaaatggatatatgagagtagagaaccaaagaaaagaaatagaagaatatgaacttcttcacaccttaaactttgatgctgtccggcgacgtatgagtgtaattgtgaagactcaagaaggagacatacttctcttttgtaaaggagcagactcggcagtttttcccagagtgcaaaatcatgaaattgagttaactaaagtccatgtggaacgtaatgcaatggatgggtatcggacactctgtgtagccttcaaagaaattgctccagatgattatgaaagaattaacagacagctcatagaggcaaaaatggccttacaagacagagaagaaaaaatggaaaaagttttcgatgatattgagacaaacatgaatttaattggagccactgcagttgaagacaagctacaagatcaagctgcagagaccattgaagctctgcatgcagcaggcctgaaagtctgggtgctcactggggacaagatggagacagctaaatccacatgctatgcctgccgccttttccagaccaacactgagctcttagaactaaccacaaaaaccattgaagaaagtgaaaggaaagaagatcgattacatgaattattgatagaatatcgcaagaaattgctgcatgagtttcctaaaagtactagaagctttaaaaaagcatggacagaacatcaggaatatggattaatcatagatggctccacattgtcactcatactaaattctagtcaagactctagttcaaacaattacaaaagcattttcctacaaatatgtatgaagtgtactgcagtgctctgctgtcggatggcaccattacagaaagcccagattgtcagaatggtgaagaatttaaaaggcagcccaataactctgtcgataggtgatggtgccaatgatgttagtatgatcttggaatcccatgtgggaataggtattaaaggcaaagaaggtcgccaagcagctaggaatagcgattattctgttccaaagtttaaacacttaaagaaactgctgttggctcatggacatctatattatgtgagaatagcacaccttgtacagtacttcttctataagaacctttgtttcattttgccacagtttttgtaccagttcttctgtggattctcacaacagccactgtatgatgctgcttaccttacaatgtacaatatctgcttcacatccttgcccatcctggcctatagtctactggaacagcacatcaacattgacactctgacctcagatccccgattgtatatgaaaatttctggcaatgccatgctacagttgggccccttcttatattggacatttctggctgcctttgaagggacagtgttcttctttgggacttactttctttttcagactgcatccctagaagaaaatggaaaggtatacggaaactggacttttggaaccattgtttttacagtcttagtattcactgtaaccctgaagcttgccttggatacccgattctggacgtggataaatcactttgtgatttggggttctttagccttctatgtatttttctcattcttctggggaggaattatttggccttttctcaagcaacagagaatgtattttgtatttgcccaaatgctgtcttctgtatccacatggttggctataattcttctaatatttatcagcctgttccctgagattcttctgatagtattaaagaatgtaagaagaagaagtgccagggtaacgaaacgcctcccttcctcaggaacatctgctatcttcatgctttctcaaacttccagcaatcacagtttctcttggagtgaataa

SEQ ID NO: 115 - DNA, 3360 bp, Human
atgcagatggtcccatctctccctccagcctctgagtgtgctggagaagagaaacgagttggcacacgcacagtgtttgttggcaatcatccagtttcggaaacagaagcttacattgcacaaagattttgtgataatagaatagtctcatctaagtatacactttggaattttctcccaaagaatctgtttgaacagtttagaagaattgcaaatttttattttctcataatcttccttgtacaggtcacagtagacacaccaactagcccagttaccagtggacttccacttttctttgttataactgttacagccatcaagcagggatatgaggattgtctgagacacagagctgacaatgaagtcaacaaaagcactgtttacattattgaaaatgcaaagcgagtgagaaaagaaagtgaaaaaatcaaggttggtgatgtagtagaagtacaggcagatgaaacctttccctgtgatcttattcttctatcatcttgcaccactgatggaacctgttatgtcactacagccagtcttgatggggaatccaattgcaagacacattatgcagtacgtgataccattgcactgtgtacagcagaatccatcgataccctccgagcagcaattgaatgtgaacagcctcaacctgacctctacaaatttgttgggcgaatcaatatctacagtaatagtcttgaggctgttgccaggtctttgggacctgaaaatctcttgctgaaaggagctacgctaaaaaataccgagaagatatatggagttgctgtttacactggaatggaaaccaaaatggctttgaactaccaagggaaatctcagaaacgttctgctgttgaaaaatctattaatgctttcctgattgtatatttatttatcttactgaccaaagctgcagtatgcactactctaaagtatgtttggcaaagtaccccatacaatgatgaaccttggtataaccaaaagactcagaaagagcgagagaccttgaaggttttaaaaatgttcaccgacttcctatcatttatggttctattcaactttatcattcctgtctccatgtacgtcacagtagaaatgcagaaattcttgggctccttcttcatctcatgggataaggacttttatgatgaagaaattaatgaaggagccctggttaacacatcagaccttaatgaagaacttggtcaggtggattatgtatttacagataagactggaacactcactgaaaacagcatggaattcattgaatgctgcatagatggccacaaatataaaggtgtaactcaagaggttgatggattatctcaaactgatggaactttaacatattttgacaaagtagataagaatcgagaagagctgtttctacgtgccttgtgtttatgtcatactgtagaaatcaaaacaaacgatgctgttgatggagctacagaatcagctgaattaacctatatctcctcttcaccagatgaaatagctttggtgaaaggagctaaaaggtacgggttcacatttttaggaaatcgaaatggatatatgagagtagagaaccaaagaaaagaaatagaagaatatgaacttcttcacaccttaaactttgatgctgtccggcgacgtatgagtgtaattgtgaagactcaagaaggagacatacttctcttttgtaaaggagcagactcggcagtttttcccagagtgcaaaatcatgaaattgagttaactaaagtccatgtggaacgtaatgcaatggatgggtatcggacactctgtgtagccttcaaagaaattgctccagatgattatgaaagaattaacagacagctcatagaggcaaaaatggccttacaagacagagaagaaaaaatggaaaaagttttcgatgatattgagacaaacatgaatttaattggagccactgcagttgaagacaagctacaagatcaagctgcagagaccattgaagctctgcatgcagcaggcctgaaagtctgggtgctcactggggacaagatggagacagctaaatccacatgctatgcctgccgccttttccagaccaacactgagctcttagaactaaccacaaaaaccattgaagaaagtgaaaggaaagaagatcgattacatgaattattgatagaatatcgcaagaaattgctgcatgagtttcctaaaagtactagaagctttaaaaaagcatggacagaacatcaggaatatggattaatcatagatggctccacattgtcactcatactaaattctagtcaagactctagttcaaacaattacaaaagcattttcctacaaatatgtatgaagtgtactgcagtgctctgctgtcggatggcaccattacagaaagcccagattgtcagaatggtgaagaatttaaaaggcagcccaataactctgtcgataggtgatggtgccaatgatgttagtatgatcttggaatcccatgtgggaataggtattaaaggcaaagaaggtcgccaagcagctaggaatagcgattattctgttccaaagtttaaacacttaaagaaactgctgttggctcatggacatctatattatgtgagaatagcacaccttgtacagtacttcttctataagaacctttgtttcattttgccacagtttttgtaccagttcttctgtggattctcacaacagccactgtatgatgctgcttaccttacaatgtacaatatctgcttcacatccttgcccatcctggcctatagtctactggaacagcacatcaacattgacactctgacctcagatccccgattgtatatgaaaatttctggcaatgccatgctacagttgggccccttcttatattggacatttctggctgcctttgaagggacagtgttcttctttgggacttactttctttttcagactgcatccctagaagaaaatggaaaggtatacggaaactggacttttggaaccattgtttttacagtcttagtattcactgtaaccctgaagcttgccttggatacccgattctggacgtggataaatcactttgtgatttggggttctttagccttctatgtatttttctcattcttctggggaggaattatttggccttttctcaagcaacagagaatgtattttgtatttgcccaaatgctgtcttctgtatccacatggttggctataattcttctaatatttatcagcctgttccctgagattcttctgatagtattaaagaatgtaagaagaagaagtgccaggaatccgaatcttgaactgcctatgttattgtcctacaagcatactgacagtggttacagctaa

SEQ ID NO: 116 - DNA, 219 bp, Human
atgatgcaaatgtttgggcttggtgcgatcagccttatcctggtatgtctgcccatttattgccgctctcttttctggaggagcgaaccggccgatgatttacaaaggcaggacaacagagttgtaacgggtttgaagaaacaaagaaggaagcgaaagaggaagtctgaaatgttacagaaagcagcaagaggacgtgaggaacatggtgacgagtag

SEQ ID NO: 117 - DNA, 1053 bp, Human
atgaacctgaggggcctcttccaggacttcaacccgagtaaattcctcatctatgcctgtctgctgctgttctctgtgctgctggcccttcgtttggatggcatcatacagtggagttactgggctgtctttgctccaatatggctgtggaagttaatggtcattgttggagcctcagttggaactggagtctgggcacgaaatcctcaatatcgagcagaaggagaaacgtgtgtggagtttaaagccatgttgattgcagtgggcatccacttgctcttgttgatgtttgaagttctggtctgtgacagaatcgagagaggaagccatttctggctcctggtcttcatgccgctgttctttgtttccccggtgtctgttgcagcttgcgtttggggctttcgacatgacaggtcactagagttagaaatcctgtgttctgtcaacattctccagtttatattcattgccttaagactggacaagatcatccactggccctggcttgttgtgtgtgtcccgctgtggattctcatgtcctttctgtgcctggtggtcctctactacattgtgtggtccgtcttgttcttgcgctctatggatgtgattgcggagcagcgcaggacacacataaccatggccctgagctggatgaccatcgtcgtgccccttcttacatttgagattctgctggttcacaaactggatggccacaacgccttctcctgcatcccgatctttgtccccctttggctctcgttgatcacgctgatggcaaccacatttggacagaagggaggaaaccactggtggtttggtatccgcaaagatttctgtcagtttctgcttgaaatcttcccatttctacgagaatatggaaacatttcctatgatctccatcacgaagataatgaagaaaccgaagagaccccagttccggagccccctaaaatcgcacccatgtttcgaaagaaggccagggtggtcattacccagagccctgggaagtatgtgctcccacctcccaaattaaatatcgaaatgccagattag

SEQ ID NO: 118 - DNA, 471 bp, Human
atgctcgggtctccttgcggcccccagctcagcgaccgagacgcagacgaggaccagtgttcacgcgagttcagggggcggcgtagccgccgcccgcccaggaggaccatgttgcgcggcaagtcccggctcaacgtggagtggctgggctactcgccaggcctgctcctcgagcacaggcccctcctggcagggcgcacgccgcggagccaccgccgaaatgaaagctcattagcatctacactgaagacgctcctgttcttcacagctttaatgatcactgttcctattgggttatatttcacaactaaatcttacatatttgaaggcgcccttgggatgtccaatagggacagctatttttacgctgctattgttgcagtggtcgccgtccatgtggtgctggccctctttgtgtatgtggcctggaatgaaggctcacgacagtggcgtgaaggcaaacaggattaa

SEQ ID NO: 119 - DNA, 1908 bp, Human
atggcgaagaagagcgccgagaacggcatctatagcgtgtccggcgacgagaagaagggccccctcatcgcgcccgggcccgacggggccccggccaagggcgacggccccgtgggcctggggacacccggcggccgcctggccgtgccgccgcgcgagacctggacgcgccagatggacttcatcatgtcgtgcgtgggcttcgccgtgggcttgggcaacgtgtggcgcttcccctacctgtgctacaagaacggcggaggtgtgttccttattccctacgtcctgatcgccctggttggaggaatccccattttcttcttagagatctcgctgggccagttcatgaaggccggcagcatcaatgtctggaacatctgtcccctgttcaaaggcctgggctacgcctccatggtgatcgtcttctactgcaacacctactacatcatggtgctggcctggggcttctattacctggtcaagtcctttaccaccacgctgccctgggccacatgtggccacacctggaacactcccgactgcgtggagatcttccgccatgaagactgtgccaatgccagcctggccaacctcacctgtgaccagcttgctgaccgccggtcccctgtcatcgagttctgggagaacaaagtcttgaggctgtctgggggactggaggtgccaggggccctcaactgggaggtgaccctttgtctgctggcctgctgggtgctggtctacttctgtgtctggaagggggtcaaatccacgggaaagatcgtgtacttcactgctacattcccctacgtggtcctggtcgtgctgctggtgcgtggagtgctgctgcctggcgccctggatggcatcatttactatctcaagcctgactggtcaaagctggggtcccctcaggtgtggatagatgcggggacccagattttcttttcttacgccattggcctgggggccctcacagccctgggcagctacaaccgcttcaacaacaactgctacaaggacgccatcatcctggctctcatcaacagtgggaccagcttctttgctggcttcgtggtcttctccatcctgggcttcatggctgcagagcagggcgtgcacatctccaaggtggcagagtcagggccgggcctggccttcatcgcctacccgcgggctgtcacgctgatgccagtggccccactctgggctgccctgttcttcttcatgctgttgctgcttggtctcgacagccagtttgtaggtgtggagggcttcatcaccggcctcctcgacctcctcccggcctcctactacttccgtttccaaagggagatctctgtggccctctgttgtgccctctgctttgtcatcgatctctccatggtgactgatggcgggatgtacgtcttccagctgtttgactactactcggccagcggcaccaccctgctctggcaggccttttgggagtgcgtggtggtggcctgggtgtacggagctgaccgcttcatggacgacattgcctgtatgatcgggtaccgaccttgcccctggatgaaatggtgctggtccttcttcaccccgctggtctgcatgggcatcttcatcttcaacgttgtgtactacgagccgctggtctacaacaacacctacgtgtacccgtggtggggtgaggccatgggctgggccttcgccctgtcctccatgctgtgcgtgccgctgcacctcctgggctgcctcctcagggccaagggcaccatggctgagcgctggcagcacctgacccagcccatctggggcctccaccacttggagtaccgagctcaggacgcagatgtcaggggcctgaccaccctgaccccagtgtccgagagcagcaaggtcgtcgtggtggagagtgtcatgtga

SEQ ID NO: 120 - DNA, 3663 bp, Human
atgggcgacatggccaatagttccatcgagttccaccccaagccccagcagcagcgggatgtcccccaggctggaggctttgggtgcacgctggcggagctgcgcaccctcatggagctgcgaggggccgaggcgctgcagaagatcgaggaggcctacggggatgtcagcgggctctgccggaggctgaagacctcacccacagagggcctggcggacaacaccaatgacctggagaagcgcaggcagatctacgggcagaacttcatccccccaaagcaacccaagaccttcctgcagctggtgtgggaggccctgcaggacgtgaccctcatcatcctggaggtggctgccatcgtctctctgggcctctcgttctatgcgccgccaggagaggagagtgaagcctgtgggaatgtgtcgggaggcgcagaagatgagggcgaggccgaagctggctggatcgagggggctgccatcctgctgtccgtcatctgtgtggtgctggtcacggccttcaatgactggagcaaggagaagcagttccgaggcctgcagagccgaattgagcaggagcagaagttcacggtcatccggaacgggcagctcctccaggtccccgtggctgcgctggtggtgggggacattgcccaggtcaagtacggcgacctgctgccagccgacggcgtgctcatccaggccaatgacctcaagatcgacgagagctccctgacgggcgagtctgaccacgtgcgcaagtcagctgacaaagatcccatgctgctctcaggcactcatgtcatggaaggttctggaagaatggtggtgaccgccgttggcgtgaattcccagacaggcatcatcttcacgctgcttggagctggcggagaggaggaagagaagaaagataagaaaggcaagcagcaggatggggccatggagagtagccagaccaaagctaagaagcaggatggtgcagtggccatggagatgcagcccctgaagagcgcggagggtggggagatggaggagcgggagaagaagaaagccaacgcacccaaaaaggagaagtctgtccttcaggggaagctcacaaagctagccgtgcagatcgggaaagcagggctggtgatgtctgccatcaccgtcatcatcctggtcctctactttgtgattgagacgtttgtcgtggaaggccggacatggctggcagagtgcacgccggtctatgtacaatacttcgtgaagttcttcatcattggtgtcactgtgctggtcgtggctgtcccagagggcctgcctcttgctgtcaccatctccttagcttactctgtcaagaaaatgatgaaagacaacaacctggtgcgccacctggatgcctgcgagaccatgggcaacgccacagccatctgctccgacaagacgggcacgctcaccaccaaccgtatgaccgtggtccagtcctacctaggagacacccactacaaagagattccggcccccagcgccctgacccctaagatcctcgacctcctggtccatgccatctccatcaacagtgcctataccaccaaaatactacctcctgagaaggaaggcgccctcccacgccaggtgggcaataagacggagtgcgccctgctgggcttcgtcttggacctgaagcgggacttccagcccgtgcgcgagcagatcccggaagacaagctttacaaagtgtacaccttcaactcggtccgcaagtccatgagcacagtcatccgcatgcccgacggtggcttccgcctcttcagcaagggggcctcagagatcctcttgaaaaagtgcaccaacatcttgaacagcaatggcgaactccggggctttcggcctcgggaccgggacgacatggtgaggaagatcatcgagccgatggcttgcgatggcctccgcaccatctgcatcgcctaccgggacttctctgcaggccaggagcccgactgggacaacgagaatgaggtcgtgggtgacctcacctgcatagctgtcgtgggcattgaggaccctgtgcggcccgaggtccctgaagctatccgaaaatgccagcgtgctggcatcacagtccgcatggtgactggggacaacatcaacacggcccgggccatcgcagccaaatgcggcatcatccagcccggggaggacttcctgtgcctagaagggaaggagttcaaccggcggatccgcaatgagaaaggcgagatagaacaggagcggctggacaaggtgtggcccaagctgagggtgctggcccggtcgtctcccaccgacaagcacacactggtcaaagggattatcgacagcaccactggtgagcagcggcaggtggtggctgtgacaggggatggcaccaacgatgggccggccctcaagaaggcggacgtgggcttcgccatgggcatcgcagggaccgacgtggccaaggaggcctccgacatcatcctgaccgatgacaacttcaccagcatcgtcaaggcagtcatgtggggccgtaacgtctatgacagcatctccaagttcctgcagtttcaactgacggtcaatgtggtggctgtgatcgtggccttcacaggtgcctgcattactcaggactctcctctcaaagccgtgcagatgttgtgggtgaacttgatcatggacacatttgcctctctggccctggcgacggagccacccacagagtcgctgctgctgcggaagccgtacggccgcgacaagcccctcatctcccgcaccatgatgaagaacattctgggccacgccgtgtaccagctcgccatcatcttcaccctgctgtttgtcggggagctcttcttcgacatcgacagcgggaggaatgcgcccctgcactcgccaccctcagagcactacaccatcatcttcaacacgttcgtcatgatgcagctctttaacgagatcaacgcccgcaagatccacggcgagaggaacgtgttcgacggcatcttcagcaaccccatcttctgcaccatcgttttgggcactttcgggattcagattgtcatcgtccagtttggcgggaagcccttcagctgctccccactatccacagaacagtggctctggtgcctgtttgttggtgttggggagctggtctggggacaggtcattgccaccatccccaccagccagctcaagtgcctgaaggaagccgggcacgggcccgggaaggacgagatgaccgacgaggagctggccgaaggcgaggaagagatcgaccatgccgagcgggagctccgcaggggccagatcctctggttccggggcctgaaccggattcagacgcagatccgggtggtgaaagcgttccgtagctcgctctatgaaggcctggagaaaccagaatccaagacctccattcacaacttcatggccacgcccgagtttctgatcaatgactacacccacaacatcccgctcattgacgacacggacgtggacgagaacgaggagcgcctccgggcccccccgcccccgtcccccaaccagaacaacaacgccatagacagcggcatctacctgaccacgcatgtcaccaagtcagctacctcttcagtgttttcctccagtcccgggagcccgctccacagcgtggagacgtccctctaa

SEQ ID NO: 121 - DNA, 1908 bp, Human; identical to SEQ ID NO: 119

SEQ ID NO: 122 - DNA, 3480 bp, Human
atgggcgacatggccaatagttccatcgagttccaccccaagccccagcagcagcgggatgtcccccaggctggaggctttgggtgcacgctggcggagctgcgcaccctcatggagctgcgaggggccgaggcgctgcagaagatcgaggaggcctacggggatgtcagcgggctctgccggaggctgaagacctcacccacagagggcctggcggacaacaccaatgacctggagaagcgcaggcagatctacgggcagaacttcatccccccaaagcaacccaagaccttcctgcagctggtgtgggaggccctgcaggacgtgaccctcatcatcctggaggtggctgccatcgtctctctgggcctctcgttctatgcgccgccaggagaggagagtgaagcctgtgggaatgtgtcgggaggcgcagaagatgagggcgaggccgaagctggctggatcgagggggctgccatcctgctgtccgtcatctgtgtggtgctggtcacggccttcaatgactggagcaaggagaagcagttccgaggcctgcagagccgaattgagcaggagcagaagttcacggtcatccggaacgggcagctcctccaggtccccgtggctgcgctggtggtgggggacattgcccaggtcaagtacggcgacctgctgccagccgacggcgtgctcatccaggccaatgacctcaagatcgacgagagctccctgacgggcgagtctgaccacgtgcgcaagtcagctgacaaagatcccatgctgctctcaggcactcatgtcatggaaggttctggaagaatggtggtgaccgccgttggcgtgaattcccagacaggcatcatcttcacgctgcttggagctggcggagaggaggaagagaagaaagataagaaagctaagaagcaggatggtgcagtggccatggagatgcagcccctgaagagcgcggagggtggggagatggaggagcgggagaagaagaaagccaacgcacccaaaaaggagaagtctgtccttcaggggaagctcacaaagctagccgtgcagatcgggaaagcagggctggtgatgtctgccatcaccgtcatcatcctggtcctctactttgtgattgagacgtttgtcgtggaaggccggacatggctggcagagtgcacgccggtctatgtacaatacttcgtgaagttcttcatcattggtgtcactgtgctggtcgtggctgtcccagagggcctgcctcttgctgtcaccatctccttagcttactctgtcaagaaaatgatgaaagacaacaacctggtgcgccacctggatgcctgcgagaccatgggcaacgccacagccatctgctccgacaagacgggcacgctcaccaccaaccgtatgaccgtggtccagtcctacctaggagacacccactacaaagagattccggcccccagcgccctgacccctaagatcctcgacctcctggtccatgccatctccatcaacagtgcctataccaccaaaatactacctcctgagaaggaaggcgccctcccacgccaggtgggcaataagacggagtgcgccctgctgggcttcgtcttggacctgaagcgggacttccagcccgtgcgcgagcagatcccggaagacaagctttacaaagtgtacaccttcaactcggtccgcaagtccatgagcacagtcatccgcatgcccgacggtggcttccgcctcttcagcaagggggcctcagagatcctcttgaaaaagtgcaccaacatcttgaacagcaatggcgaactccggggctttcggcctcgggaccgggacgacatggtgaggaagatcatcgagccgatggcttgcgatggcctccgcaccatctgcatcgcctaccgggacttctctgcaggccaggagcccgactgggacaacgagaatgaggtcgtgggtgacctcacctgcatagctgtcgtgggcattgaggaccctgtgcggcccgaggtccctgaagctatccgaaaatgccagcgtgctggcatcacagtccgcatggtgactggggacaacatcaacacggcccgggccatcgcagccaaatgcggcatcatccagcccggggaggacttcctgtgcctagaagggaaggagttcaaccggcggatccgcaatgagaaaggcgagatagaacaggagcggctggacaaggtgtggcccaagctgagggtgctggcccggtcgtctcccaccgacaagcacacactggtcaaagggattatcgacagcaccactggtgagcagcggcaggtggtggctgtgacaggggatggcaccaacgatgggccggccctcaagaaggcggacgtgggcttcgccatgggcatcgcagggaccgacgtggccaaggaggcctccgacatcatcctgaccgatgacaacttcaccagcatcgtcaaggcagtcatgtggggccgtaacgtctatgacagcatctccaagttcctgcagtttcaactgacggtcaatgtggtggctgtgatcgtggccttcacaggtgcctgcattactcaggactctcctctcaaagccgtgcagatgttgtgggtgaacttgatcatggacacatttgcctctctggccctggcgacggagccacccacagagtcgctgctgctgcggaagccgtacggccgcgacaagcccctcatctcccgcaccatgatgaagaacattctgggccacgccgtgtaccagctcgccatcatcttcaccctgctgtttgtcggggagctcttcttcgacatcgacagcgggaggaatgcgcccctgcactcgccaccctcagagcactacaccatcatcttcaacacgttcgtcatgatgcagctctttaacgagatcaacgcccgcaagatccacggcgagaggaacgtgttcgacggcatcttcagcaaccccatcttctgcaccatcgttttgggcactttcgggattcagattgtcatcgtccagtttggcgggaagcccttcagctgctccccactatccacagaacagtggctctggtgcctgtttgttggtgttggggagctggtctggggacaggtcattgccaccatccccaccagccagctcaagtgcctgaaggaagccgggcacgggcccgggaaggacgagatgaccgacgaggagctggccgaaggcgaggaagagatcgaccatgccgagcgggagctccgcaggggccagatcctctggttccggggcctgaaccggattcagacgcagatggaggtagtgagtaccttcaagagaagcggttcagttcagggtgctgtgcgccggcggtcttcggtcctcagccagcttcatgacgtaaccaatctttctacccctactcacgcaattctctctgctgccaatcctaccagtgctgctgggaatccgggtggtgaaagcgttccgtag

SEQ ID NO: 123 - DNA, 306 bp, Human
atggagcgcccggataaggcggcgctgaacgcactgcagcctcctgagttcagaaatgaaagctcattagcatctacactgaagacgctcctgttcttcacagctttaatgatcactgttcctattgggttatatttcacaactaaatcttacatatttgaaggcgcccttgggatgtccaatagggacagctatttttacgctgctattgttgcagtggtcgccgtccatgtggtgctggccctctttgtgtatgtggcctggaatgaaggctcacgacagtggcgtgaaggcaaacaggattaa

SEQ ID NO: 124 - DNA, 2187 bp, Human
atgctccccaccctgcaaatccagggcccagcagcctttgctcctggggatagaggccctggcaggcactgtcccttccctgtgcccatcacccccactggtgccctcctgccagtctctgactcttgtgacagtctggtggacctggtctggccatctgttacctatcttgccttggggacccagagcagagtctggccacatcccttgggggctcctggtcaggctggggagtcacctgaacaaagaagacagtgtctagagctgtgggacatggccagctccctgggggacaaggtccccagagcagcatgtgggaagagggggcagacagtgtggcagctgcatctcgcctgcctctgcctggcccagttccactctccacctgctcaacccccacctctctccagaagaggagggggacccgacccggatccaatatcccgctccctgcctgggcctcccacacctgcactgcccacacactcatacagctctcactccccacgtgctccacgcctcctgtccccactgaggagagctcccagaggctcgcctgctccccaccgacacgcgtccctgcagacaaacgaggcgcccagggagcttccccactgcacttggccagggctgccggggcgcagccttgcccctagcttcctctggcgggagccatggctcggaggacaatggggacctctgaacatacctgcccgcaagggggaccggaggcgctgggagtgggggtgtgagggaggtggtgccacagcctccgctgagcagcctccccagatcgtgtacttcactgctacattcccctacgtggtcctggtcgtgctgctggtgcgtggagtgctgctgcctggcgccctggatggcatcatttactatctcaagcctgactggtcaaagctggggtcccctcaggtgtggatagatgcggggacccagattttcttttcttacgccattggcctgggggccctcacagccctgggcagctacaaccgcttcaacaacaactgctacaaggacgccatcatcctggctctcatcaacagtgggaccagcttctttgctggcttcgtggtcttctccatcctgggcttcatggctgcagagcagggcgtgcacatctccaaggtggcagagtcagggccgggcctggccttcatcgcctacccgcgggctgtcacgctgatgccagtggccccactctgggctgccctgttcttcttcatgctgttgctgcttggtctcgacagccaggtttgcatggggctctgggacagggagccaggaggggggcggagggagggctgcaggcaaggaaaggggtggaggtgcggggctcggcctgagctgccctggccacagtttgtaggtgtggagggcttcatcaccggcctcctcgacctcctcccggcctcctactacttccgtttccaaagggagatctctgtggccctctgttgtgccctctgctttgtcatcgatctctccatggtgactgatgtgagtggggtggggggtctgcctgtgacctctggtggccgtctgccatcctccctgactgggctctgtcccggcgggatgtacgtcttccagctgtttgactactactcggccagcggcaccaccctgctctggcaggccttttgggagtgcgtggtggtggcctgggtgtacggtaggtcatggctgagggctgggctgggggatggtggcggggaaggcaggtctccagcttggccctcccgcctcacctcgccgcaggctgaccgcttcatggacgacattgcctgtatgatcgggtaccgaccttgcccctggatgaaatggtgctggtccttcttcaccccgctggtctgcatgggcatcttcatcttcaacgttgtgtactacgagccgctggtctacaacaacacctacgtgtacccgtggtggggtgaggccatgggctgggccttcgccctgtcctccatgctgtgcgtgccgctgcacctcctgggctgcctcctcagggccaagggcaccatggctgagcgctggcagcacctgacccagcccatctggggcctccaccacttggagtaccgagctcaggacgcagatgtcaggggcctgaccaccctgaccccagtgtccgagagcagcaaggtcgtcgtggtggagagtgtcatgtga

SEQ ID NO: 125 - DNA, 3327 bp, Human
atgcagatggtcccatctctccctccagcctctgagtgtgctggagaagagaaacgagttggcacacgcacagtgtttgttggcaatcatccagtttcggaaacagaagcttacattgcacaaagattttgtgataatagaatagtctcatctaagtatacactttggaattttctcccaaagaatctgtttgaacagtttagaagaattgcaaatttttattttctcataatcttccttgtacaggtcacagtagacacaccaactagcccagttaccagtggacttccacttttctttgttataactgttacagccatcaagcagggatatgaggattgtctgagacacagagctgacaatgaagtcaacaaaagcactgtttacattattgaaaatgcaaagcgagtgagaaaagaaagtgaaaaaatcaaggttggtgatgtagtagaagtacaggcagatgaaacctttccctgtgatcttattcttctatcatcttgcaccactgatggaacctgttatgtcactacagccagtcttgatggggaatccaattgcaagacacattatgcagtacgtgataccattgcactgtgtacagcagaatccatcgataccctccgagcagcaattgaatgtgaacagcctcaacctgacctctacaaatttgttgggcgaatcaatatctacagtaatagtcttgaggctgttgccaggtctttgggacctgaaaatctcttgctgaaaggagctacgctaaaaaataccgagaagatatatggagttgctgtttacactggaatggaaaccaaaatggctttgaactaccaagggaaatctcagaaacgttctgctgttgaaaaatctattaatgctttcctgattgtatatttatttatcttactgaccaaagctgcagtatgcactactctaaagtatgtttggcaaagtaccccatacaatgatgaaccttggtataaccaaaagactcagaaagagcgagagaccttgaaggttttaaaaatgttcaccgacttcctatcatttatggttctattcaactttatcattcctgtctccatgtacgtcacagtagaaatgcagaaattcttgggctccttcttcatctcatgggataaggacttttatgatgaagaaattaatgaaggagccctggttaacacatcagaccttaatgaagaacttggtcaggtggattatgtatttacagataagactggaacactcactgaaaacagcatggaattcattgaatgctgcatagatggccacaaatataaaggtgtaactcaagaggttgatggattatctcaaactgatggaactttaacatattttgacaaagtagataagaatcgagaagagctgtttctacgtgccttgtgtttatgtcatactgtagaaatcaaaacaaacgatgctgttgatggagctacagaatcagctgaattaacctatatctcctcttcaccagatgaaatagctttggtgaaaggagctaaaaggtacgggttcacatttttaggaaatcgaaatggatatatgagagtagagaaccaaagaaaagaaatagaagaatatgaacttcttcacaccttaaactttgatgctgtccggcgacgtatgagtgtaattgtgaagactcaagaaggagacatacttctcttttgtaaaggagcagactcggcagtttttcccagagtgcaaaatcatgaaattgagttaactaaagtccatgtggaacgtaatgcaatggatgggtatcggacactctgtgtagccttcaaagaaattgctccagatgattatgaaagaattaacagacagctcatagaggcaaaaatggccttacaagacagagaagaaaaaatggaaaaagttttcgatgatattgagacaaacatgaatttaattggagccactgcagttgaagacaagctacaagatcaagctgcagagaccattgaagctctgcatgcagcaggcctgaaagtctgggtgctcactggggacaagatggagacagctaaatccacatgctatgcctgccgccttttccagaccaacactgagctcttagaactaaccacaaaaaccattgaagaaagtgaaaggaaagaagatcgattacatgaattattgatagaatatcgcaagaaattgctgcatgagtttcctaaaagtactagaagctttaaaaaagcatggacagaacatcaggaatatggattaatcatagatggctccacattgtcactcatactaaattctagtcaagactctagttcaaacaattacaaaagcattttcctacaaatatgtatgaagtgtactgcagtgctctgctgtcggatggcaccattacagaaagcccagattgtcagaatggtgaagaatttaaaaggcagcccaataactctgtcgataggtgatggtgccaatgatgttagtatgatcttggaatcccatgtgggaataggtattaaaggcaaagaaggtcgccaagcagctaggaatagcgattattctgttccaaagtttaaacacttaaagaaactgctgttggctcatggacatctatattatgtgagaatagcacaccttgtacagtacttcttctataagaacctttgtttcattttgccacagtttttgtaccagttcttctgtggattctcacaacagccactgtatgatgctgcttaccttacaatgtacaatatctgcttcacatccttgcccatcctggcctatagtctactggaacagcacatcaacattgacactctgacctcagatccccgattgtatatgaaaatttctggcaatgccatgctacagttgggccccttcttatattggacatttctggctgcctttgaagggacagtgttcttctttgggacttactttctttttcagactgcatccctagaagaaaatggaaaggtatacggaaactggacttttggaaccattgtttttacagtcttagtattcactgtaaccctgaagcttgccttggatacccgattctggacgtggataaatcactttgtgatttggggttctttagccttctatgtatttttctcattcttctggggaggaattatttggccttttctcaagcaacagagaatgtattttgtatttgcccaaatgctgtcttctgtatccacatggttggctataattcttctaatatttatcagcctgttccctgagattcttctgatagtattaaagaatgtaagaagaagaagtgccagggttcatcacttaatttcctcttctgcataa

SEQ ID NO: 126 - DNA, 3399 bp, Human
atgcagatggtcccatctctccctccagcctctgagtgtgctggagaagagaaacgagttggcacacgcacagtgtttgttggcaatcatccagtttcggaaacagaagcttacattgcacaaagattttgtgataatagaatagtctcatctaagtatacactttggaattttctcccaaagaatctgtttgaacagtttagaagaattgcaaatttttattttctcataatcttccttgtacaggtcacagtagacacaccaactagcccagttaccagtggacttccacttttctttgttataactgttacagccatcaagcagggatatgaggattgtctgagacacagagctgacaatgaagtcaacaaaagcactgtttacattattgaaaatgcaaagcgagtgagaaaagaaagtgaaaaaatcaaggttggtgatgtagtagaagtacaggcagatgaaacctttccctgtgatcttattcttctatcatcttgcaccactgatggaacctgttatgtcactacagccagtcttgatggggaatccaattgcaagacacattatgcagtacgtgataccattgcactgtgtacagcagaatccatcgataccctccgagcagcaattgaatgtgaacagcctcaacctgacctctacaaatttgttgggcgaatcaatatctacagtaatagtcttgaggctgttgccaggtctttgggacctgaaaatctcttgctgaaaggagctacgctaaaaaataccgagaagatatatggagttgctgtttacactggaatggaaaccaaaatggctttgaactaccaagggaaatctcagaaacgttctgctgttgaaaaatctattaatgctttcctgattgtatatttatttatcttactgaccaaagctgcagtatgcactactctaaagtatgtttggcaaagtaccccatacaatgatgaaccttggtataaccaaaagactcagaaagagcgagagaccttgaaggttttaaaaatgttcaccgacttcctatcatttatggttctattcaactttatcattcctgtctccatgtacgtcacagtagaaatgcagaaattcttgggctccttcttcatctcatgggataaggacttttatgatgaagaaattaatgaaggagccctggttaacacatcagaccttaatgaagaacttggtcaggtggattatgtatttacagataagactggaacactcactgaaaacagcatggaattcattgaatgctgcatagatggccacaaatataaaggtgtaactcaagaggttgatggattatctcaaactgatggaactttaacatattttgacaaagtagataagaatcgagaagagctgtttctacgtgccttgtgtttatgtcatactgtagaaatcaaaacaaacgatgctgttgatggagctacagaatcagctgaattaacctatatctcctcttcaccagatgaaatagctttggtgaaaggagctaaaaggtacgggttcacatttttaggaaatcgaaatggatatatgagagtagagaaccaaagaaaagaaatagaagaatatgaacttcttcacaccttaaactttgatgctgtccggcgacgtatgagtgtaattgtgaagactcaagaaggagacatacttctcttttgtaaaggagcagactcggcagtttttcccagagtgcaaaatcatgaaattgagttaactaaagtccatgtggaacgtaatgcaatggatgggtatcggacactctgtgtagccttcaaagaaattgctccagatgattatgaaagaattaacagacagctcatagaggcaaaaatggccttacaagacagagaagaaaaaatggaaaaagttttcgatgatattgagacaaacatgaatttaattggagccactgcagttgaagacaagctacaagatcaagctgcagagaccattgaagctctgcatgcagcaggcctgaaagtctgggtgctcactggggacaagatggagacagctaaatccacatgctatgcctgccgccttttccagaccaacactgagctcttagaactaaccacaaaaaccattgaagaaagtgaaaggaaagaagatcgattacatgaattattgatagaatatcgcaagaaattgctgcatgagtttcctaaaagtactagaagctttaaaaaagcatggacagaacatcaggaatatggattaatcatagatggctccacattgtcactcatactaaattctagtcaagactctagttcaaacaattacaaaagcattttcctacaaatatgtatgaagtgtactgcagtgctctgctgtcggatggcaccattacagaaagcccagattgtcagaatggtgaagaatttaaaaggcagcccaataactctgtcgataggtgatggtgccaatgatgttagtatgatcttggaatcccatgtgggaataggtattaaaggcaaagaaggtcgccaagcagctaggaatagcgattattctgttccaaagtttaaacacttaaagaaactgctgttggctcatggacatctatattatgtgagaatagcacaccttgtacagtacttcttctataagaacctttgtttcattttgccacagtttttgtaccagttcttctgtggattctcacaacagccactgtatgatgctgcttaccttacaatgtacaatatctgcttcacatccttgcccatcctggcctatagtctactggaacagcacatcaacattgacactctgacctcagatccccgattgtatatgaaaatttctggcaatgccatgctacagttgggccccttcttatattggacatttctggctgcctttgaagggacagtgttcttctttgggacttactttctttttcagactgcatccctagaagaaaatggaaaggtatacggaaactggacttttggaaccattgtttttacagtcttagtattcactgtaaccctgaagcttgccttggatacccgattctggacgtggataaatcactttgtgatttggggttctttagccttctatgtatttttctcattcttctggggaggaattatttggccttttctcaagcaacagagaatgtattttgtatttgcccaaatgctgtcttctgtatccacatggttggctataattcttctaatatttatcagcctgttccctgagattcttctgatagtattaaagaatgtaagaagaagaagtgccaggagaaatctgagctgtagaagggcatctgactcattatccgccagaccttcagtcagacctcttcttttacgaacattctcagacgaatctaatgtattgtaa

SEQ ID NO: 127 - DNA, 3621 bp, Human
atgggcgacatggccaatagttccatcgagttccaccccaagccccagcagcagcgggatgtcccccaggctggaggctttgggtgcacgctggcggagctgcgcaccctcatggagctgcgaggggccgaggcgctgcagaagatcgaggaggcctacggggatgtcagcgggctctgccggaggctgaagacctcacccacagagggcctggcggacaacaccaatgacctggagaagcgcaggcagatctacgggcagaacttcatccccccaaagcaacccaagaccttcctgcagctggtgtgggaggccctgcaggacgtgaccctcatcatcctggaggtggctgccatcgtctctctgggcctctcgttctatgcgccgccaggagaggagagtgaagcctgtgggaatgtgtcgggaggcgcagaagatgagggcgaggccgaagctggctggatcgagggggctgccatcctgctgtccgtcatctgtgtggtgctggtcacggccttcaatgactggagcaaggagaagcagttccgaggcctgcagagccgaattgagcaggagcagaagttcacggtcatccggaacgggcagctcctccaggtccccgtggctgcgctggtggtgggggacattgcccaggtcaagtacggcgacctgctgccagccgacggcgtgctcatccaggccaatgacctcaagatcgacgagagctccctgacgggcgagtctgaccacgtgcgcaagtcagctgacaaagatcccatgctgctctcaggcactcatgtcatggaaggttctggaagaatggtggtgaccgccgttggcgtgaattcccagacaggcatcatcttcacgctgcttggagctggcggagaggaggaagagaagaaagataagaaagctaagaagcaggatggtgcagtggccatggagatgcagcccctgaagagcgcggagggtggggagatggaggagcgggagaagaagaaagccaacgcacccaaaaaggagaagtctgtccttcaggggaagctcacaaagctagccgtgcagatcgggaaagcagggctggtgatgtctgccatcaccgtcatcatcctggtcctctactttgtgattgagacgtttgtcgtggaaggccggacatggctggcagagtgcacgccggtctatgtacaatacttcgtgaagttcttcatcattggtgtcactgtgctggtcgtggctgtcccagagggcctgcctcttgctgtcaccatctccttagcttactctgtcaagaaaatgatgaaagacaacaacctggtgcgccacctggatgcctgcgagaccatgggcaacgccacagccatctgctccgacaagacgggcacgctcaccaccaaccgtatgaccgtggtccagtcctacctaggagacacccactacaaagagattccggcccccagcgccctgacccctaagatcctcgacctcctggtccatgccatctccatcaacagtgcctataccaccaaaatactacctcctgagaaggaaggcgccctcccacgccaggtgggcaataagacggagtgcgccctgctgggcttcgtcttggacctgaagcgggacttccagcccgtgcgcgagcagatcccggaagacaagctttacaaagtgtacaccttcaactcggtccgcaagtccatgagcacagtcatccgcatgcccgacggtggcttccgcctcttcagcaagggggcctcagagatcctcttgaaaaagtgcaccaacatcttgaacagcaatggcgaactccggggctttcggcctcgggaccgggacgacatggtgaggaagatcatcgagccgatggcttgcgatggcctccgcaccatctgcatcgcctaccgggacttctctgcaggccaggagcccgactgggacaacgagaatgaggtcgtgggtgacctcacctgcatagctgtcgtgggcattgaggaccctgtgcggcccgaggtccctgaagctatccgaaaatgccagcgtgctggcatcacagtccgcatggtgactggggacaacatcaacacggcccgggccatcgcagccaaatgcggcatcatccagcccggggaggacttcctgtgcctagaagggaaggagttcaaccggcggatccgcaatgagaaaggcgagatagaacaggagcggctggacaaggtgtggcccaagctgagggtgctggcccggtcgtctcccaccgacaagcacacactggtcaaagggattatcgacagcaccactggtgagcagcggcaggtggtggctgtgacaggggatggcaccaacgatgggccggccctcaagaaggcggacgtgggcttcgccatgggcatcgcagggaccgacgtggccaaggaggcctccgacatcatcctgaccgatgacaacttcaccagcatcgtcaaggcagtcatgtggggccgtaacgtctatgacagcatctccaagttcctgcagtttcaactgacggtcaatgtggtggctgtgatcgtggccttcacaggtgcctgcattactcaggactctcctctcaaagccgtgcagatgttgtgggtgaacttgatcatggacacatttgcctctctggccctggcgacggagccacccacagagtcgctgctgctgcggaagccgtacggccgcgacaagcccctcatctcccgcaccatgatgaagaacattctgggccacgccgtgtaccagctcgccatcatcttcaccctgctgtttgtcggggagctcttcttcgacatcgacagcgggaggaatgcgcccctgcactcgccaccctcagagcactacaccatcatcttcaacacgttcgtcatgatgcagctctttaacgagatcaacgcccgcaagatccacggcgagaggaacgtgttcgacggcatcttcagcaaccccatcttctgcaccatcgttttgggcactttcgggattcagattgtcatcgtccagtttggcgggaagcccttcagctgctccccactatccacagaacagtggctctggtgcctgtttgttggtgttggggagctggtctggggacaggtcattgccaccatccccaccagccagctcaagtgcctgaaggaagccgggcacgggcccgggaaggacgagatgaccgacgaggagctggccgaaggcgaggaagagatcgaccatgccgagcgggagctccgcaggggccagatcctctggttccggggcctgaaccggattcagacgcagatccgggtggtgaaagcgttccgtagctcgctctatgaaggcctggagaaaccagaatccaagacctccattcacaacttcatggccacgcccgagtttctgatcaatgactacacccacaacatcccgctcattgacgacacggacgtggacgagaacgaggagcgcctccgggcccccccgcccccgtcccccaaccagaacaacaacgccatagacagcggcatctacctgaccacgcatgtcaccaagtcagctacctcttcagtgttttcctccagtcccgggagcccgctccacagcgtggagacgtccctctaa

SEQ ID NO: 128 - DNA, 3762 bp, Human
atggtcgtggcgctgcggtacgtgtggcctctcctcctctgcagcccctgcctgcttatccagatccccgaggaatatgaaggacaccatgtgatggagccacctgtcatcacggaacagtctccacggcgcctggttgtcttccccacagatgacatcagcctcaagtgtgaggccagtggcaagcccgaagtgcagttccgctggacgagggatggtgtccacttcaaacccaaggaagagctgggtgtgaccgtgtaccagtcgccccactctggctccttcaccatcacgggcaacaacagcaactttgctcagaggttccagggcatctaccgctgctttgccagcaataagctgggcaccgccatgtcccatgagatccggctcatggccgagggtgcccccaagtggccaaaggagacagtgaagcccgtggaggtggaggaaggggagtcagtggttctgccttgcaaccctcccccaagtgcagagcctctccggatctactggatgaacagcaagatcttgcacatcaagcaggacgagcgggtgacgatgggccagaacggcaacctctactttgccaatgtgctcacctccgacaaccactcagactacatctgccacgcccacttcccaggcaccaggaccatcattcagaaggaacccattgacctccgggtcaaggccaccaacagcatgattgacaggaagccgcgcctgctcttccccaccaactccagcagccacctggtggccttgcaggggcagccattggtcctggagtgcatcgccgagggctttcccacgcccaccatcaaatggctgcgccccagtggccccatgccagccgaccgtgtcacctaccagaaccacaacaagaccctgcagctgctgaaagtgggcgaggaggatgatggcgagtaccgctgcctggccgagaactcactgggcagtgcccggcatgcgtactatgtcaccgtggaggctgccccgtactggctgcacaagccccagagccatctatatgggccaggagagactgcccgcctggactgccaagtccagggcaggccccaaccagaggtcacctggagaatcaacgggatccctgtggaggagctggccaaagaccagaagtaccggattcagcgtggcgccctgatcctgagcaacgtgcagcccagtgacacaatggtgacccaatgtgaggcccgcaaccggcacgggctcttgctggccaatgcctacatctacgttgtccagctgccagccaagatcctgactgcggacaatcagacgtacatggctgtccagggcagcactgcctaccttctgtgcaaggccttcggagcgcctgtgcccagtgttcagtggctggacgaggatgggacaacagtgcttcaggacgaacgcttcttcccctatgccaatgggaccctgggcattcgagacctccaggccaatgacaccggacgctacttctgcctggctgccaatgaccaaaacaatgttaccatcatggctaacctgaaggttaaagatgcaactcagatcactcaggggccccgcagcacaatcgagaagaaaggttccagggtgaccttcacgtgccaggcctcctttgacccctccttgcagcccagcatcacctggcgtggggacggtcgagacctccaggagcttggggacagtgacaagtacttcatagaggatgggcgcctggtcatccacagcctggactacagcgaccagggcaactacagctgcgtggccagtaccgaactggatgtggtggagagtagggcacagctcttggtggtggggagccctgggccggtgccacggctggtgctgtccgacctgcacctgctgacgcagagccaggtgcgcgtgtcctggagtcctgcagaagaccacaatgcccccattgagaaatatgacattgaatttgaggacaaggaaatggcgcctgaaaaatggtacagtctgggcaaggttccagggaaccagacctctaccaccctcaagctgtcgccctatgtccactacacctttagggttactgccataaacaaatatggccccggggagcccagcccggtctctgagactgtggtcacacctgaggcagccccagagaagaaccctgtggatgtgaagggggaaggaaatgagaccaccaatatggtcatcacgtggaagccgctccggtggatggactggaacgccccccaggttcagtaccgcgtgcagtggcgccctcaggggacacgagggccctggcaggagcagattgtcagcgaccccttcctggtggtgtccaacacgtccaccttcgtgccctatgagatcaaagtccaggccgtcaacagccagggcaagggaccagagccccaggtcactatcggctactctggagaggactacccccaggcaatccctgagctggaaggcattgaaatcctcaactcaagtgccgtgctggtcaagtggcggccggtggacctggcccaggtcaagggccacctccgcggatacaatgtgacgtactggagggagggcagtcagaggaagcacagcaagagacatatccacaaagaccatgtggtggtgcccgccaacaccaccagtgtcatcctcagtggcttgcggccctatagctcctaccacctggaggtgcaggcctttaacgggcgaggatcggggcccgccagcgagttcaccttcagcaccccagagggagtgcctggccaccccgaggcgttgcacctggagtgccagtcgaacaccagcctgctgctgcgctggcagcccccactcagccacaacggcgtgctcaccggctacgtgctctcctaccaccccctggatgaggggggcaaggggcaactgtccttcaaccttcgggaccccgaacttcggacacacaacctgaccgatctcagcccccacctgcggtaccgcttccagcttcaggccaccaccaaagagggccctggtgaagccatcgtacgggaaggaggcactatggccttgtctgggatctcagattttggcaacatctcagccacagcgggtgaaaactacagtgtcgtctcctgggtccccaaggagggccagtgcaacttcaggttccatatcttgttcaaagccttgggagaagagaagggtggggcttccctttcgccacagtatgtcagctacaaccagagctcctacacgcagtgggacctgcagcctgacactgactacgagatccacttgtttaaggagaggatgttccggcaccaaatggctgtgaagaccaatggcacaggccgcgtgaggctccctcctgctggcttcgccactgagggctggttcatcggctttgtgagtgccatcatcctcctgctcctcgtcctgctcatcctctgcttcatcaagcgcagcaagggcggcaaatactcagtgaaggataaggaggacacccaggtggactctgaggcccgaccgatgaaagatgagaccttcggcgagtacagtgacaacgaggagaaggcctttggcagcagccagccatcgctcaacggggacatcaagcccctgggcagtgacgacagcctggccgattatgggggcagcgtggatgttcagttcaacgaggatggttcgttcattggccagtacagtggcaagaaggagaaggaggcggcagggggcaatgacagctcaggggccacttcccccatcaaccctgccgtggccctagaatag

SEQ ID NO: 129 - DNA, 3774 bp, Human
atggtcgtggcgctgcggtacgtgtggcctctcctcctctgcagcccctgcctgcttatccagatccccgaggaatatgaaggacaccatgtgatggagccacctgtcatcacggaacagtctccacggcgcctggttgtcttccccacagatgacatcagcctcaagtgtgaggccagtggcaagcccgaagtgcagttccgctggacgagggatggtgtccacttcaaacccaaggaagagctgggtgtgaccgtgtaccagtcgccccactctggctccttcaccatcacgggcaacaacagcaactttgctcagaggttccagggcatctaccgctgctttgccagcaataagctgggcaccgccatgtcccatgagatccggctcatggccgagggtgcccccaagtggccaaaggagacagtgaagcccgtggaggtggaggaaggggagtcagtggttctgccttgcaaccctcccccaagtgcagagcctctccggatctactggatgaacagcaagatcttgcacatcaagcaggacgagcgggtgacgatgggccagaacggcaacctctactttgccaatgtgctcacctccgacaaccactcagactacatctgccacgcccacttcccaggcaccaggaccatcattcagaaggaacccattgacctccgggtcaaggccaccaacagcatgattgacaggaagccgcgcctgctcttccccaccaactccagcagccacctggtggccttgcaggggcagccattggtcctggagtgcatcgccgagggctttcccacgcccaccatcaaatggctgcgccccagtggccccatgccagccgaccgtgtcacctaccagaaccacaacaagaccctgcagctgctgaaagtgggcgaggaggatgatggcgagtaccgctgcctggccgagaactcactgggcagtgcccggcatgcgtactatgtcaccgtggaggctgccccgtactggctgcacaagccccagagccatctatatgggccaggagagactgcccgcctggactgccaagtccagggcaggccccaaccagaggtcacctggagaatcaacgggatccctgtggaggagctggccaaagaccagaagtaccggattcagcgtggcgccctgatcctgagcaacgtgcagcccagtgacacaatggtgacccaatgtgaggcccgcaaccggcacgggctcttgctggccaatgcctacatctacgttgtccagctgccagccaagatcctgactgcggacaatcagacgtacatggctgtccagggcagcactgcctaccttctgtgcaaggccttcggagcgcctgtgcccagtgttcagtggctggacgaggatgggacaacagtgcttcaggacgaacgcttcttcccctatgccaatgggaccctgggcattcgagacctccaggccaatgacaccggacgctacttctgcctggctgccaatgaccaaaacaatgttaccatcatggctaacctgaaggttaaagatgcaactcagatcactcaggggccccgcagcacaatcgagaagaaaggttccagggtgaccttcacgtgccaggcctcctttgacccctccttgcagcccagcatcacctggcgtggggacggtcgagacctccaggagcttggggacagtgacaagtacttcatagaggatgggcgcctggtcatccacagcctggactacagcgaccagggcaactacagctgcgtggccagtaccgaactggatgtggtggagagtagggcacagctcttggtggtggggagccctgggccggtgccacggctggtgctgtccgacctgcacctgctgacgcagagccaggtgcgcgtgtcctggagtcctgcagaagaccacaatgcccccattgagaaatatgacattgaatttgaggacaaggaaatggcgcctgaaaaatggtacagtctgggcaaggttccagggaaccagacctctaccaccctcaagctgtcgccctatgtccactacacctttagggttactgccataaacaaatatggccccggggagcccagcccggtctctgagactgtggtcacacctgaggcagccccagagaagaaccctgtggatgtgaagggggaaggaaatgagaccaccaatatggtcatcacgtggaagccgctccggtggatggactggaacgccccccaggttcagtaccgcgtgcagtggcgccctcaggggacacgagggccctggcaggagcagattgtcagcgaccccttcctggtggtgtccaacacgtccaccttcgtgccctatgagatcaaagtccaggccgtcaacagccagggcaagggaccagagccccaggtcactatcggctactctggagaggactacccccaggcaatccctgagctggaaggcattgaaatcctcaactcaagtgccgtgctggtcaagtggcggccggtggacctggcccaggtcaagggccacctccgcggatacaatgtgacgtactggagggagggcagtcagaggaagcacagcaagagacatatccacaaagaccatgtggtggtgcccgccaacaccaccagtgtcatcctcagtggcttgcggccctatagctcctaccacctggaggtgcaggcctttaacgggcgaggatcggggcccgccagcgagttcaccttcagcaccccagagggagtgcctggccaccccgaggcgttgcacctggagtgccagtcgaacaccagcctgctgctgcgctggcagcccccactcagccacaacggcgtgctcaccggctacgtgctctcctaccaccccctggatgaggggggcaaggggcaactgtccttcaaccttcgggaccccgaacttcggacacacaacctgaccgatctcagcccccacctgcggtaccgcttccagcttcaggccaccaccaaagagggccctggtgaagccatcgtacgggaaggaggcactatggccttgtctgggatctcagattttggcaacatctcagccacagcgggtgaaaactacagtgtcgtctcctgggtccccaaggagggccagtgcaacttcaggttccatatcttgttcaaagccttgggagaagagaagggtggggcttccctttcgccacagtatgtcagctacaaccagagctcctacacgcagtgggacctgcagcctgacactgactacgagatccacttgtttaaggagaggatgttccggcaccaaatggctgtgaagaccaatggcacaggccgcgtgaggctccctcctgctggcttcgccactgagggctggttcatcggctttgtgagtgccatcatcctcctgctcctcgtcctgctcatcctctgcttcatcaagcgcagcaagggcggcaaatactcagtgaaggataaggaggacacccaggtggactctgaggcccgaccgatgaaagatgagaccttcggcgagtacaggtccctggagagtgacaacgaggagaaggcctttggcagcagccagccatcgctcaacggggacatcaagcccctgggcagtgacgacagcctggccgattatgggggcagcgtggatgttcagttcaacgaggatggttcgttcattggccagtacagtggcaagaaggagaaggaggcggcagggggcaatgacagctcaggggccacttcccccatcaaccctgccgtggccctagaatag

SEQ ID NO: 130 - DNA, 3762 bp, Human
atggtcgtggcgctgcggtacgtgtggcctctcctcctctgcagcccctgcctgcttatccagatccccgaggaatatgaaggacaccatgtgatggagccacctgtcatcacggaacagtctccacggcgcctggttgtcttccccacagatgacatcagcctcaagtgtgaggccagtggcaagcccgaagtgcagttccgctggacgagggatggtgtccacttcaaacccaaggaagagctgggtgtgaccgtgtaccagtcgccccactctggctccttcaccatcacgggcaacaacagcaactttgctcagaggttccagggcatctaccgctgctttgccagcaataagctgggcaccgccatgtcccatgagatccggctcatggccgagggtgcccccaagtggccaaaggagacagtgaagcccgtggaggtggaggaaggggagtcagtggttctgccttgcaaccctcccccaagtgcagagcctctccggatctactggatgaacagcaagatcttgcacatcaagcaggacgagcgggtgacgatgggccagaacggcaacctctactttgccaatgtgctcacctccgacaaccactcagactacatctgccacgcccacttcccaggcaccaggaccatcattcagaaggaacccattgacctccgggtcaaggccaccaacagcatgattgacaggaagccgcgcctgctcttccccaccaactccagcagccacctggtggccttgcaggggcagccattggtcctggagtgcatcgccgagggctttcccacgcccaccatcaaatggctgcgccccagtggccccatgccagccgaccgtgtcacctaccagaaccacaacaagaccctgcagctgctgaaagtgggcgaggaggatgatggcgagtaccgctgcctggccgagaactcactgggcagtgcccggcatgcgtactatgtcaccgtggaggctgccccgtactggctgcacaagccccagagccatctatatgggccaggagagactgcccgcctggactgccaagtccagggcaggccccaaccagaggtcacctggagaatcaacgggatccctgtggaggagctggccaaagaccagaagtaccggattcagcgtggcgccctgatcctgagcaacgtgcagcccagtgacacaatggtgacccaatgtgaggcccgcaaccggcacgggctcttgctggccaatgcctacatctacgttgtccagctgccagccaagatcctgactgcggacaatcagacgtacatggctgtccagggcagcactgcctaccttctgtgcaaggccttcggagcgcctgtgcccagtgttcagtggctggacgaggatgggacaacagtgcttcaggacgaacgcttcttcccctatgccaatgggaccctgggcattcgagacctccaggccaatgacaccggacgctacttctgcctggctgccaatgaccaaaacaatgttaccatcatggctaacctgaaggttaaagatgcaactcagatcactcaggggccccgcagcacaatcgagaagaaaggttccagggtgaccttcacgtgccaggcctcctttgacccctccttgcagcccagcatcacctggcgtggggacggtcgagacctccaggagcttggggacagtgacaagtacttcatagaggatgggcgcctggtcatccacagcctggactacagcgaccagggcaactacagctgcgtggccagtaccgaactggatgtggtggagagtagggcacagctcttggtggtgggtaaccctgggccggtgccacggctggtgctgtccgacctgcacctgctgacgcagagccaggtgcgcgtgtcctggagtcctgcagaagaccacaatgcccccattgagaaatatgacattgaatttgaggacaaggaaatggcgcctgaaaaatggtacagtctgggcaaggttccagggaaccagacctctaccaccctcaagctgtcgccctatgtccactacacctttagggttactgccataaacaaatatggccccggggagcccagcccggtctctgagactgtggtcacacctgaggcagccccagagaagaaccctgtggatgtgaagggggaaggaaatgagaccaccaatatggtcatcacgtggaagccgctccggtggatggactggaacgccccccaggttcagtaccgcgtgcagtggcgccctcaggggacacgagggccctggcaggagcagattgtcagcgaccccttcctggtggtgtccaacacgtccaccttcgtgccctatgagatcaaagtccaggccgtcaacagccagggcaagggaccagagccccaggtcactatcggctactctggagaggactacccccaggcaatccctgagctggaaggcattgaaatcctcaactcaagtgccgtgctggtcaagtggcggccggtggacctggcccaggtcaagggccacctccgcggatacaatgtgacgtactggagggagggcagtcagaggaagcacagcaagagacatatccacaaagaccatgtggtggtgcccgccaacaccaccagtgtcatcctcagtggcttgcggccctatagctcctaccacctggaggtgcaggcctttaacgggcgaggatcggggcccgccagcgagttcaccttcagcaccccagagggagtgcctggccaccccgaggcgttgcacctggagtgccagtcgaacaccagcctgctgctgcgctggcagcccccactcagccacaacggcgtgctcaccggctacgtgctctcctaccaccccctggatgaggggggcaaggggcaactgtccttcaaccttcgggaccccgaacttcggacacacaacctgaccgatctcagcccccacctgcggtaccgcttccagcttcaggccaccaccaaagagggccctggtgaagccatcgtacgggaaggaggcactatggccttgtctgggatctcagattttggcaacatctcagccacagcgggtgaaaactacagtgtcgtctcctgggtccccaaggagggccagtgcaacttcaggttccatatcttgttcaaagccttgggagaagagaagggtggggcttccctttcgccacagtatgtcagctacaaccagagctcctacacgcagtgggacctgcagcctgacactgactacgagatccacttgtttaaggagaggatgttccggcaccaaatggctgtgaagaccaatggcacaggccgcgtgaggctccctcctgctggcttcgccactgagggctggttcatcggctttgtgagtgccatcatcctcctgctcctcgtcctgctcatcctctgcttcatcaagcgcagcaagggcggcaaatactcagtgaaggataaggaggacacccaggtggactctgaggcccgaccgatgaaagatgagaccttcggcgagtacagtgacaacgaggagaaggcctttggcagcagccagccatcgctcaacggggacatcaagcccctgggcagtgacgacagcctggccgattatgggggcagcgtggatgttcagttcaacgaggatggttcgttcattggccagtacagtggcaagaaggagaaggaggcggcagggggcaatgacagctcaggggccacttcccccatcaaccctgccgtggccctagaatag

SEQ ID NO: 131 - DNA, 3663 bp, Human; identical to SEQ ID NO: 120

SEQ ID NO: 132 - DNA, 3774 bp, Human; identical to SEQ ID NO: 129

SEQ ID NO: 133 - DNA, 3522 bp, Human
atgggcgacatggccaatagttccatcgagttccaccccaagccccagcagcagcgggatgtcccccaggctggaggctttgggtgcacgctggcggagctgcgcaccctcatggagctgcgaggggccgaggcgctgcagaagatcgaggaggcctacggggatgtcagcgggctctgccggaggctgaagacctcacccacagagggcctggcggacaacaccaatgacctggagaagcgcaggcagatctacgggcagaacttcatccccccaaagcaacccaagaccttcctgcagctggtgtgggaggccctgcaggacgtgaccctcatcatcctggaggtggctgccatcgtctctctgggcctctcgttctatgcgccgccaggagaggagagtgaagcctgtgggaatgtgtcgggaggcgcagaagatgagggcgaggccgaagctggctggatcgagggggctgccatcctgctgtccgtcatctgtgtggtgctggtcacggccttcaatgactggagcaaggagaagcagttccgaggcctgcagagccgaattgagcaggagcagaagttcacggtcatccggaacgggcagctcctccaggtccccgtggctgcgctggtggtgggggacattgcccaggtcaagtacggcgacctgctgccagccgacggcgtgctcatccaggccaatgacctcaagatcgacgagagctccctgacgggcgagtctgaccacgtgcgcaagtcagctgacaaagatcccatgctgctctcaggcactcatgtcatggaaggttctggaagaatggtggtgaccgccgttggcgtgaattcccagacaggcatcatcttcacgctgcttggagctggcggagaggaggaagagaagaaagataagaaaggcaagcagcaggatggggccatggagagtagccagaccaaagctaagaagcaggatggtgcagtggccatggagatgcagcccctgaagagcgcggagggtggggagatggaggagcgggagaagaagaaagccaacgcacccaaaaaggagaagtctgtccttcaggggaagctcacaaagctagccgtgcagatcgggaaagcagggctggtgatgtctgccatcaccgtcatcatcctggtcctctactttgtgattgagacgtttgtcgtggaaggccggacatggctggcagagtgcacgccggtctatgtacaatacttcgtgaagttcttcatcattggtgtcactgtgctggtcgtggctgtcccagagggcctgcctcttgctgtcaccatctccttagcttactctgtcaagaaaatgatgaaagacaacaacctggtgcgccacctggatgcctgcgagaccatgggcaacgccacagccatctgctccgacaagacgggcacgctcaccaccaaccgtatgaccgtggtccagtcctacctaggagacacccactacaaagagattccggcccccagcgccctgacccctaagatcctcgacctcctggtccatgccatctccatcaacagtgcctataccaccaaaatactacctcctgagaaggaaggcgccctcccacgccaggtgggcaataagacggagtgcgccctgctgggcttcgtcttggacctgaagcgggacttccagcccgtgcgcgagcagatcccggaagacaagctttacaaagtgtacaccttcaactcggtccgcaagtccatgagcacagtcatccgcatgcccgacggtggcttccgcctcttcagcaagggggcctcagagatcctcttgaaaaagtgcaccaacatcttgaacagcaatggcgaactccggggctttcggcctcgggaccgggacgacatggtgaggaagatcatcgagccgatggcttgcgatggcctccgcaccatctgcatcgcctaccgggacttctctgcaggccaggagcccgactgggacaacgagaatgaggtcgtgggtgacctcacctgcatagctgtcgtgggcattgaggaccctgtgcggcccgaggtccctgaagctatccgaaaatgccagcgtgctggcatcacagtccgcatggtgactggggacaacatcaacacggcccgggccatcgcagccaaatgcggcatcatccagcccggggaggacttcctgtgcctagaagggaaggagttcaaccggcggatccgcaatgagaaaggcgagatagaacaggagcggctggacaaggtgtggcccaagctgagggtgctggcccggtcgtctcccaccgacaagcacacactggtcaaagggattatcgacagcaccactggtgagcagcggcaggtggtggctgtgacaggggatggcaccaacgatgggccggccctcaagaaggcggacgtgggcttcgccatgggcatcgcagggaccgacgtggccaaggaggcctccgacatcatcctgaccgatgacaacttcaccagcatcgtcaaggcagtcatgtggggccgtaacgtctatgacagcatctccaagttcctgcagtttcaactgacggtcaatgtggtggctgtgatcgtggccttcacaggtgcctgcattactcaggactctcctctcaaagccgtgcagatgttgtgggtgaacttgatcatggacacatttgcctctctggccctggcgacggagccacccacagagtcgctgctgctgcggaagccgtacggccgcgacaagcccctcatctcccgcaccatgatgaagaacattctgggccacgccgtgtaccagctcgccatcatcttcaccctgctgtttgtcggggagctcttcttcgacatcgacagcgggaggaatgcgcccctgcactcgccaccctcagagcactacaccatcatcttcaacacgttcgtcatgatgcagctctttaacgagatcaacgcccgcaagatccacggcgagaggaacgtgttcgacggcatcttcagcaaccccatcttctgcaccatcgttttgggcactttcgggattcagattgtcatcgtccagtttggcgggaagcccttcagctgctccccactatccacagaacagtggctctggtgcctgtttgttggtgttggggagctggtctggggacaggtcattgccaccatccccaccagccagctcaagtgcctgaaggaagccgggcacgggcccgggaaggacgagatgaccgacgaggagctggccgaaggcgaggaagagatcgaccatgccgagcgggagctccgcaggggccagatcctctggttccggggcctgaaccggattcagacgcagatggaggtagtgagtaccttcaagagaagcggttcagttcagggtgctgtgcgccggcggtcttcggtcctcagccagcttcatgacgtaaccaatctttctacccctactcacgcaattctctctgctgccaatcctaccagtgctgctgggaatccgggtggtgaaagcgttccgtag

SEQ ID NO: 134 - DNA, 3774 bp, Human
atggtcgtggcgctgcggtacgtgtggcctctcctcctctgcagcccctgcctgcttatccagatccccgaggaatatgaaggacaccatgtgatggagccacctgtcatcacggaacagtctccacggcgcctggttgtcttccccacagatgacatcagcctcaagtgtgaggccagtggcaagcccgaagtgcagttccgctggacgagggatggtgtccacttcaaacccaaggaagagctgggtgtgaccgtgtaccagtcgccccactctggctccttcaccatcacgggcaacaacagcaactttgctcagaggttccagggcatctaccgctgctttgccagcaataagctgggcaccgccatgtcccatgagatccggctcatggccgagggtgcccccaagtggccaaaggagacagtgaagcccgtggaggtggaggaaggggagtcagtggttctgccttgcaaccctcccccaagtgcagagcctctccggatctactggatgaacagcaagatcttgcacatcaagcaggacgagcgggtgacgatgggccagaacggcaacctctactttgccaatgtgctcacctccgacaaccactcagactacatctgccacgcccacttcccaggcaccaggaccatcattcagaaggaacccattgacctccgggtcaaggccaccaacagcatgattgacaggaagccgcgcctgctcttccccaccaactccagcagccacctggtggccttgcaggggcagccattggtcctggagtgcatcgccgagggctttcccacgcccaccatcaaatggctgcgccccagtggccccatgccagccgaccgtgtcacctaccagaaccacaacaagaccctgcagctgctgaaagtgggcgaggaggatgatggcgagtaccgctgcctggccgagaactcactgggcagtgcccggcatgcgtactatgtcaccgtggaggctgccccgtactggctgcacaagccccagagccatctatatgggccaggagagactgcccgcctggactgccaagtccagggcaggccccaaccagaggtcacctggagaatcaacgggatccctgtggaggagctggccaaagaccagaagtaccggattcagcgtggcgccctgatcctgagcaacgtgcagcccagtgacacaatggtgacccaatgtgaggcccgcaaccggcacgggctcttgctggccaatgcctacatctacgttgtccagctgccagccaagatcctgactgcggacaatcagacgtacatggctgtccagggcagcactgcctaccttctgtgcaaggccttcggagcgcctgtgcccagtgttcagtggctggacgaggatgggacaacagtgcttcaggacgaacgcttcttcccctatgccaatgggaccctgggcattcgagacctccaggccaatgacaccggacgctacttctgcctggctgccaatgaccaaaacaatgttaccatcatggctaacctgaaggttaaagatgcaactcagatcactcaggggccccgcagcacaatcgagaagaaaggttccagggtgaccttcacgtgccaggcctcctttgacccctccttgcagcccagcatcacctggcgtggggacggtcgagacctccaggagcttggggacagtgacaagtacttcatagaggatgggcgcctggtcatccacagcctggactacagcgaccagggcaactacagctgcgtggccagtaccgaactggatgtggtggagagtagggcacagctcttggtggtgggtaaccctgggccggtgccacggctggtgctgtccgacctgcacctgctgacgcagagccaggtgcgcgtgtcctggagtcctgcagaagaccacaatgcccccattgagaaatatgacattgaatttgaggacaaggaaatggcgcctgaaaaatggtacagtctgggcaaggttccagggaaccagacctctaccaccctcaagctgtcgccctatgtccactacacctttagggttactgccataaacaaatatggccccggggagcccagcccggtctctgagactgtggtcacacctgaggcagccccagagaagaaccctgtggatgtgaagggggaaggaaatgagaccaccaatatggtcatcacgtggaagccgctccggtggatggactggaacgccccccaggttcagtaccgcgtgcagtggcgccctcaggggacacgagggccctggcaggagcagattgtcagcgaccccttcctggtggtgtccaacacgtccaccttcgtgccctatgagatcaaagtccaggccgtcaacagccagggcaagggaccagagccccaggtcactatcggctactctggagaggactacccccaggcaatccctgagctggaaggcattgaaatcctcaactcaagtgccgtgctggtcaagtggcggccggtggacctggcccaggtcaagggccacctccgcggatacaatgtgacgtactggagggagggcagtcagaggaagcacagcaagagacatatccacaaagaccatgtggtggtgcccgccaacaccaccagtgtcatcctcagtggcttgcggccctatagctcctaccacctggaggtgcaggcctttaacgggcgaggatcggggcccgccagcgagttcaccttcagcaccccagagggagtgcctggccaccccgaggcgttgcacctggagtgccagtcgaacaccagcctgctgctgcgctggcagcccccactcagccacaacggcgtgctcaccggctacgtgctctcctaccaccccctggatgaggggggcaaggggcaactgtccttcaaccttcgggaccccgaacttcggacacacaacctgaccgatctcagcccccacctgcggtaccgcttccagcttcaggccaccaccaaagagggccctggtgaagccatcgtacgggaaggaggcactatggccttgtctgggatctcagattttggcaacatctcagccacagcgggtgaaaactacagtgtcgtctcctgggtccccaaggagggccagtgcaacttcaggttccatatcttgttcaaagccttgggagaagagaagggtggggcttccctttcgccacagtatgtcagctacaaccagagctcctacacgcagtgggacctgcagcctgacactgactacgagatccacttgtttaaggagaggatgttccggcaccaaatggctgtgaagaccaatggcacaggccgcgtgaggctccctcctgctggcttcgccactgagggctggttcatcggctttgtgagtgccatcatcctcctgctcctcgtcctgctcatcctctgcttcatcaagcgcagcaagggcggcaaatactcagtgaaggataaggaggacacccaggtggactctgaggcccgaccgatgaaagatgagaccttcggcgagtacaggtccctggagagtgacaacgaggagaaggcctttggcagcagccagccatcgctcaacggggacatcaagcccctgggcagtgacgacagcctggccgattatgggggcagcgtggatgttcagttcaacgaggatggttcgttcattggccagtacagtggcaagaaggagaaggaggcggcagggggcaatgacagctcaggggccacttcccccatcaaccctgccgtggccctagaatag

SEQ ID NO: 135 - DNA, 3387 bp, Human
atgggcgacatggccaatagttccatcgagttccaccccaagccccagcagcagcgggatgtcccccaggctggaggctttgggtgcacgctggcggagctgcgcaccctcatggagctgcgaggggccgaggcgctgcagaagatcgaggaggcctacggggatgtcagcgggctctgccggaggctgaagacctcacccacagagggcctggcggacaacaccaatgacctggagaagcgcaggcagatctacgggcagaacttcatccccccaaagcaacccaagaccttcctgcagctggtgtgggaggccctgcaggacgtgaccctcatcatcctggaggtggctgccatcgtctctctgggcctctcgttctatgcgccgccaggagaggagagtgaagcctgtgggaatgtgtcgggaggcgcagaagatgagggcgaggccgaagctggctggatcgagggggctgccatcctgctgtccgtcatctgtgtggtgctggtcacggccttcaatgactggagcaaggagaagcagttccgaggcctgcagagccgaattgagcaggagcagaagttcacggtcatccggaacgggcagctcctccaggtccccgtggctgcgctggtggtgggggacattgcccaggtcaagtacggcgacctgctgccagccgacggcgtgctcatccaggccaatgacctcaagatcgacgagagctccctgacgggcgagtctgaccacgtgcgcaagtcagctgacaaagatcccatgctgctctcaggcactcatgtcatggaaggttctggaagaatggtggtgaccgccgttggcgtgaattcccagacaggcatcatcttcacgctgcttggagctggcggagaggaggaagagaagaaagataagaaaggcaagcagcaggatggggccatggagagtagccagaccaaagctaagaagcaggatggtgcagtggccatggagatgcagcccctgaagagcgcggagggtggggagatggaggagcgggagaagaagaaagccaacgcacccaaaaaggagaagtctgtccttcaggggaagctcacaaagctagccgtgcagatcgggaaagcagggctggtgatgtctgccatcaccgtcatcatcctggtcctctactttgtgattgagacgtttgtcgtggaaggccggacatggctggcagagtgcacgccggtctatgtacaatacttcgtgaagttcttcatcattggtgtcactgtgctggtcgtggctgtcccagagggcctgcctcttgctgtcaccatctccttagcttactctgtcaagaaaatgatgaaagacaacaacctggtgcgccacctggatgcctgcgagaccatgggcaacgccacagccatctgctccgacaagacgggcacgctcaccaccaaccgtatgaccgtggtccagtcctacctaggagacacccactacaaagagattccggcccccagcgccctgacccctaagatcctcgacctcctggtccatgccatctccatcaacagtgcctataccaccaaaatactacctcctgagaaggaaggcgccctcccacgccaggtgggcaataagacggagtgcgccctgctgggcttcgtcttggacctgaagcgggacttccagcccgtgcgcgagcagatcccggaagacaagctttacaaagtgtacaccttcaactcggtccgcaagtccatgagcacagtcatccgcatgcccgacggtggcttccgcctcttcagcaagggggcctcagagatcctcttgaaaaagtgcaccaacatcttgaacagcaatggcgaactccggggctttcggcctcgggaccgggacgacatggtgaggaagatcatcgagccgatggcttgcgatggcctccgcaccatctgcatcgcctaccgggacttctctgcaggccaggagcccgactgggacaacgagaatgaggtcgtgggtgacctcacctgcatagctgtcgtgggcattgaggaccctgtgcggcccgaggtccctgaagctatccgaaaatgccagcgtgctggcatcacagtccgcatggtgactggggacaacatcaacacggcccgggccatcgcagccaaatgcggcatcatccagcccggggaggacttcctgtgcctagaagggaaggagttcaaccggcggatccgcaatgagaaaggcgagatagaacaggagcggctggacaaggtgtggcccaagctgagggtgctggcccggtcgtctcccaccgacaagcacacactggtcaaagggattatcgacagcaccactggtgagcagcggcaggtggtggctgtgacaggggatggcaccaacgatgggccggccctcaagaaggcggacgtgggcttcgccatgggcatcgcagggaccgacgtggccaaggaggcctccgacatcatcctgaccgatgacaacttcaccagcatcgtcaaggcagtcatgtggggccgtaacgtctatgacagcatctccaagttcctgcagtttcaactgacggtcaatgtggtggctgtgatcgtggccttcacaggtgcctgcattactcaggactctcctctcaaagccgtgcagatgttgtgggtgaacttgatcatggacacatttgcctctctggccctggcgacggagccacccacagagtcgctgctgctgcggaagccgtacggccgcgacaagcccctcatctcccgcaccatgatgaagaacattctgggccacgccgtgtaccagctcgccatcatcttcaccctgctgtttgtcggggagctcttcttcgacatcgacagcgggaggaatgcgcccctgcactcgccaccctcagagcactacaccatcatcttcaacacgttcgtcatgatgcagctctttaacgagatcaacgcccgcaagatccacggcgagaggaacgtgttcgacggcatcttcagcaaccccatcttctgcaccatcgttttgggcactttcgggattcagattgtcatcgtccagtttggcgggaagcccttcagctgctccccactatccacagaacagtggctctggtgcctgtttgttggtgttggggagctggtctggggacaggtcattgccaccatccccaccagccagctcaagtgcctgaaggaagccgggcacgggcccgggaaggacgagatgaccgacgaggagctggccgaaggcgaggaagagatcgaccatgccgagcgggagctccgcaggggccagatcctctggttccggggcctgaaccggattcagacgcaggtgtgttggagaggaaaaacaaggttgagaactatgaagtacttc

SEQ ID NO: 136 - DNA, 3747 bp, Human
atggtcgtggcgctgcggtacgtgtggcctctcctcctctgcagcccctgcctgcttatccagatccccgaggaattgatggagccacctgtcatcacggaacagtctccacggcgcctggttgtcttccccacagatgacatcagcctcaagtgtgaggccagtggcaagcccgaagtgcagttccgctggacgagggatggtgtccacttcaaacccaaggaagagctgggtgtgaccgtgtaccagtcgccccactctggctccttcaccatcacgggcaacaacagcaactttgctcagaggttccagggcatctaccgctgctttgccagcaataagctgggcaccgccatgtcccatgagatccggctcatggccgagggtgcccccaagtggccaaaggagacagtgaagcccgtggaggtggaggaaggggagtcagtggttctgccttgcaaccctcccccaagtgcagagcctctccggatctactggatgaacagcaagatcttgcacatcaagcaggacgagcgggtgacgatgggccagaacggcaacctctactttgccaatgtgctcacctccgacaaccactcagactacatctgccacgcccacttcccaggcaccaggaccatcattcagaaggaacccattgacctccgggtcaaggccaccaacagcatgattgacaggaagccgcgcctgctcttccccaccaactccagcagccacctggtggccttgcaggggcagccattggtcctggagtgcatcgccgagggctttcccacgcccaccatcaaatggctgcgccccagtggccccatgccagccgaccgtgtcacctaccagaaccacaacaagaccctgcagctgctgaaagtgggcgaggaggatgatggcgagtaccgctgcctggccgagaactcactgggcagtgcccggcatgcgtactatgtcaccgtggaggctgccccgtactggctgcacaagccccagagccatctatatgggccaggagagactgcccgcctggactgccaagtccagggcaggccccaaccagaggtcacctggagaatcaacgggatccctgtggaggagctggccaaagaccagaagtaccggattcagcgtggcgccctgatcctgagcaacgtgcagcccagtgacacaatggtgacccaatgtgaggcccgcaaccggcacgggctcttgctggccaatgcctacatctacgttgtccagctgccagccaagatcctgactgcggacaatcagacgtacatggctgtccagggcagcactgcctaccttctgtgcaaggccttcggagcgcctgtgcccagtgttcagtggctggacgaggatgggacaacagtgcttcaggacgaacgcttcttcccctatgccaatgggaccctgggcattcgagacctccaggccaatgacaccggacgctacttctgcctggctgccaatgaccaaaacaatgttaccatcatggctaacctgaaggttaaagatgcaactcagatcactcaggggccccgcagcacaatcgagaagaaaggttccagggtgaccttcacgtgccaggcctcctttgacccctccttgcagcccagcatcacctggcgtggggacggtcgagacctccaggagcttggggacagtgacaagtacttcatagaggatgggcgcctggtcatccacagcctggactacagcgaccagggcaactacagctgcgtggccagtaccgaactggatgtggtggagagtagggcacagctcttggtggtggggagccctgggccggtgccacggctggtgctgtccgacctgcacctgctgacgcagagccaggtgcgcgtgtcctggagtcctgcagaagaccacaatgcccccattgagaaatatgacattgaatttgaggacaaggaaatggcgcctgaaaaatggtacagtctgggcaaggttccagggaaccagacctctaccaccctcaagctgtcgccctatgtccactacacctttagggttactgccataaacaaatatggccccggggagcccagcccggtctctgagactgtggtcacacctgaggcagccccagagaagaaccctgtggatgtgaagggggaaggaaatgagaccaccaatatggtcatcacgtggaagccgctccggtggatggactggaacgccccccaggttcagtaccgcgtgcagtggcgccctcaggggacacgagggccctggcaggagcagattgtcagcgaccccttcctggtggtgtccaacacgtccaccttcgtgccctatgagatcaaagtccaggccgtcaacagccagggcaagggaccagagccccaggtcactatcggctactctggagaggactacccccaggcaatccctgagctggaaggcattgaaatcctcaactcaagtgccgtgctggtcaagtggcggccggtggacctggcccaggtcaagggccacctccgcggatacaatgtgacgtactggagggagggcagtcagaggaagcacagcaagagacatatccacaaagaccatgtggtggtgcccgccaacaccaccagtgtcatcctcagtggcttgcggccctatagctcctaccacctggaggtgcaggcctttaacgggcgaggatcggggcccgccagcgagttcaccttcagcaccccagagggagtgcctggccaccccgaggcgttgcacctggagtgccagtcgaacaccagcctgctgctgcgctggcagcccccactcagccacaacggcgtgctcaccggctacgtgctctcctaccaccccctggatgaggggggcaaggggcaactgtccttcaaccttcgggaccccgaacttcggacacacaacctgaccgatctcagcccccacctgcggtaccgcttccagcttcaggccaccaccaaagagggccctggtgaagccatcgtacgggaaggaggcactatggccttgtctgggatctcagattttggcaacatctcagccacagcgggtgaaaactacagtgtcgtctcctgggtccccaaggagggccagtgcaacttcaggttccatatcttgttcaaagccttgggagaagagaagggtggggcttccctttcgccacagtatgtcagctacaaccagagctcctacacgcagtgggacctgcagcctgacactgactacgagatccacttgtttaaggagaggatgttccggcaccaaatggctgtgaagaccaatggcacaggccgcgtgaggctccctcctgctggcttcgccactgagggctggttcatcggctttgtgagtgccatcatcctcctgctcctcgtcctgctcatcctctgcttcatcaagcgcagcaagggcggcaaatactcagtgaaggataaggaggacacccaggtggactctgaggcccgaccgatgaaagatgagaccttcggcgagtacagtgacaacgaggagaaggcctttggcagcagccagccatcgctcaacggggacatcaagcccctgggcagtgacgacagcctggccgattatgggggcagcgtggatgttcagttcaacgaggatggttcgttcattggccagtacagtggcaagaaggagaaggaggcggcagggggcaatgacagctcaggggccacttcccccatcaaccctgccgtggccctagaatag

SEQ ID NO: 137 - DNA, 2433 bp, Bovine
gaggaggaggaggacgccgccgtgagttctccgccatgaacctgaggggccttttccaggacttcaacccgagtaaattcctcatctatgcctgtctactgctgttctctgtgttgctggcccttcgtctagatggcatcattcagtggagttactgggctgtttttgctccaatatggctgtggaagttaatggtcattgttggagcctcagttggaactggagtctgggcacggaatccccaatatcgagcagaaggggaaacatgtgtggagttcaaggccatgctaattgcagtgggcatccacttgctgttgctgatgtttgaagtgctggtgtgcgacaggattgagagaggcagccacttctggctcctggtcttcatgccactcttcttcgtttcccccgtgtctgtggcagcttgtgtttggggctttcgccatgacaggtcactggagttagaaatcctgtgttctgtcaacattctccagtttatattcattgccttaagactggacaagatcattcactggccctggcttgtcgtgtgtgtccccttgtggattctcatgtcgtttctgtgtctggtagtcctctactacatcgtgtggtccgtcctgttcctgcgttccatggatgtgatcgcagagcagaggaggacacacatcaccatggcgctaagctggatgaccatcgttgtgccactccttacttttgagatcctgctggttcataagctggacggccacaatgcattctcctgtatccccatatttgtccccctttggctttccttgatcactctgatggcaaccaccttcggacagaaaggcggaaaccactggtggtttgggattcgcaaggatttctgtcagtttctgcttgaaatctgcccgtttttgagagaatatggaaacatctcctacgacctccaccatgaaggtagcgaggaaactgaagaaacgccagttccagaacctcctaagatcgctcctatgtttcgaaagaagacccgggtggttatcacccagagccctgggaagtacgtcctcccacctcccaaattaaatatcgaaatgccagattagaccgtgttcccagggcagatcaagagtgcacctggcccgccctcttttccaccttcttctgcctccattcaccccctccctcccaccctgaactggagctggagctgggtctccagggacttccatctcatgccttgtttgcactcaatgcctacccagtgactcaccgccacgggacatgcggctggcaggtgcctggaacatgcagcgtggtgtagggtgcacatcagcggatttggacctgatggagggagcatatggagacagaggaaacaactcccagtgggcaggtgccttcagagctggcttgggcccaagaaggaatggccacccagctggttttctaagtgtgaaaattcccatcaaaagtgttattgaaaaatgtattattgaaccaagccagcctggccacttagctcagaaactcctgttgtggtgtggtcaggggccctgactaagcctcaggcctcacatgcacccacaccactgtcactggccatgctcctgccatgcacatcatttctgggtttttactgaccccattggtgagccctttctaatggagtgactccgtgcctgtatagtatttatacaaatattttagcgttgtaatataccgtgttaaatcctagttctgtacagtatattctgttaaagtatttttttacaagcttgtactggagacatacatgttctgttgcagaagtagaagccagtagcaccgcacccctgtcctgaccactggagtgctacccccttcatgggacattgccatctcctcttcagtttctccatatacatactagctgctgctgccagaactgccacagtaagcaagaaatggtttgtactttttctcccacactgggaacactgacttgcagaaaaccgtaaagcacgcctgggagctggagcgctggacaaggtgccaagactgggaatgtccagcagcgtgcacaggttgagatgtggggcttgttgtccatcacacactgcacctatgcttttagctaggagcttggggtagagccgagagtcagaaggaaaaaagcagatgcgatgcaaacaagatggccatgagtaaaagagggtaaaaggagccctggctttgtcacccaggagcaggggggagagggcagctactgccttgtgtgaaccaggctctgctgatgtacactgcaccaccactccatcctgacaccagcctggaacaagcccgtgctctcttcaggggcacacttggaatggtgttgcctttcctgcttggtatgtaacacatgtagcccagtctactctttttctcccctttagctgttcaataaactagttcttcattttccatgtg

SEQ ID NO: 138 - protein, 350 aa, Bovine
MNLRGLFQDFNPSKFLIYACLLLFSVLLALRLDGIIQWSYWAVFAPIWLWKLMVIVGASVGTGVWARNPQYRAEGETCVEFKAMLIAVGIHLLLLMFEVLVCDRIERGSHFWLLVFMPLFFVSPVSVAACVWGFRHDRSLELEILCSVNILQFIFIALRLDKIIHWPWLVVCVPLWILMSFLCLVVLYYIVWSVLFLRSMDVIAEQRRTHITMALSWMTIVVPLLTFEILLVHKLDGHNAFSCIPIFVPLWLSLITLMATTFGQKGGNHWWFGIRKDFCQFLLEICPFLREYGNISYDLHHEGSEETEETPVPEPPKIAPMFRKKTRVVITQSPGKYVLPPPKLNIEMPD

SEQ ID NO: 139 - DNA, 2330 bp, Bovine
cccccggtccgccgtcctcggcccccggcgggcccgcgccttcggggcctttatccccccctgcgccgctggcgaccccgcgcctgtccgcccgcccgcccccgcgggccgccgtgcccccggccatggccaacaagagcacggagaacggcatctacagcgtgtccggcgaggagaagaagggccccctaatcgcgcccgggcccgacggagccccggccaagggcgacggccccgcagccctgggggcgcccggcagcctcctggccgttccgccgcgcgagacctggacgcgccagatggacttcatcatgtcgtgcgtgggctttgccgtgggcctgggcaacgtgtggcgcttcccctacctgtgctacaagaacggcggaggtgtgttccttattccctacatcctgatcgccctgattggaggaatccccatcttcttcttggagatctcgctgggccagttcatgaaggccggcagcatcaacgtctggaatatctgccccctgttcaaaggcctgggctacgcctccatggtgatcgtcttctactgcaacacctattacatcatggtgctggcctggggcttctattatctggtgaagtccttcaccaccacgctgccctgggccacgtgtggccacacgtggaacactcccgattgcgtggagatcttccgccacgaagactgtgccaatgccaccatggccaacctcacatgtgaccagcttgctgaccgccggtccccggtcatcgagttctgggagaacaaagtcttgcggctctctgaagggctggaggtgccaggggccctcaactgggaggtgaccctgtgtctgctgacctgctgggtgctggtctacttctgtgtctggaagggggtcaagtcaacaggcaagatcgtgtatttcaccgctacattcccctatgtggtcctcgttgtgctgctggtgcgcggagtgctgctacctggcgctttggatggcatcatctactatctcaagcctgactggtcaaagctggcatcccctcaggtatggatcgacgcagggacacagatcttcttctcttacgccatcggcttgggggccctcaccgccctgggcagctacaatcgcttcaacaacaactgctacaaggatgccatcatactcgccctcatcaacagcgggaccagcttctttgcaggcttcgtggtgttctccatcctgggcttcatggccacagaacagggcgtgcacatctccaaggtagcagaatcagggcctggcctggctttcatcgcctatccgcgggccgtcacgctgatgcccgtggccccactctgggcagctctgttcttcttcatgctgttgctgcttggtctggacagccagtttgtaggtgtcgaaggcttcatcactggcttgctggacctcctcccagcctcctactacttccgattccaaagggagatctccgtggccctctgttgcaccatctgctttgtcatcgacctctccatggtgactgatggcgggatgtatgtcttccagctgtttgactactactcagccagtggcaccacactgctctggcaggccttctgggagtgtgtggtggtcgcctgggtgtacggagctgatcgcttcatggatgatgtggcctgcatgatcgggtaccgaccttgcccctggatgaaatggtgctggtctttcttcaccccactggtgtgcatgggcatcttcatcttcaatgtggtctaccatgagccgctggtctacaacaatacctacgtgtacccgtggtggggcgaggccgtgggctgggcctttgcgctctcctccatgctatgtgtgcccctccacctcctgggctgcctcctcagggccaaggggaccatggctgagcgctggcagcacctgacgcagcccatctggggcctccaccacctggaatacagagctcaagactcggatgtcaggggcctgaccaccctgaccccagtgtctgagagcagcaaggtggtggtggtggaaagcgtcatgtgacgggcccccggcaccagctccccctcttgtagccatagcatccctgctttagccccccccacccctcccggggggcttgcctttccctgccactcaacgggggtctgcctgcctggggtggggggaggggaggaagcaccagagtgcttataactcacttttttttccatttttaataaaacaccaaaaaaataccacaacccaccaaaaatagatgcctccccgcccccataaccaagctggtgcacacgctgttccccagcgcaccgcccccccccgcccctgctagtacccact

SEQ ID NO: 140 - protein, 635 aa, Bovine
MANKSTENGIYSVSGEEKKGPLIAPGPDGAPAKGDGPAALGAPGSLLAVPPRETWTRQMDFIMSCVGFAVGLGNVWRFPYLCYKNGGGVFLIPYILIALIGGIPIFFLEISLGQFMKAGSINVWNICPLFKGLGYASMVIVFYCNTYYIMVLAWGFYYLVKSFTTTLPWATCGHTWNTPDCVEIFRHEDCANATMANLTCDQLADRRSPVIEFWENKVLRLSEGLEVPGALNWEVTLCLLTCWVLVYFCVWKGVKSTGKIVYFTATFPYVVLVVLLVRGVLLPGALDGIIYYLKPDWSKLASPQVWIDAGTQIFFSYAIGLGALTALGSYNRFNNNCYKDAIILALINSGTSFFAGFVVFSILGFMATEQGVHISKVAESGPGLAFIAYPRAVTLMPVAPLWAALFFFMLLLLGLDSQFVGVEGFITGLLDLLPASYYFRFQREISVALCCTICFVIDLSMVTDGGMYVFQLFDYYSASGTTLLWQAFWECVVVAWVYGADRFMDDVACMIGYRPCPWMKWCWSFFTPLVCMGIFIFNVVYHEPLVYNNTYVYPWWGEAVGWAFALSSMLCVPLHLLGCLLRAKGTMAERWQHLTQPIWGLHHLEYRAQDSDVRGLTTLTPVSESSKVVVVESVM

SEQ ID NO: 141 - DNA, 3453 bp, Bovine
attgagagtacctcaaactctccctccagctcatctcttcaaaagagtcctttgaacatagttagccagcctctaactcaagaaactgtgataaacattgatggcatgacttgtaattcgtgtgtgcagtctattgaaggtgtcatatcaaaaaaggcaggtgtaaaatccatacaagtatcacttgcaaatggcaaagggactgttgagtatgatcctttactaacctctccagaaaccttgagagaagcaatagaaaacatgggatttgatgcttccttgtcagatacaaatgagccattggtagtaatagctcagccctcatcagaaatgccacttttgacctcaactaatgaatttcacaccaaaatgatgacaccaattcatgacaaggaggagccaaagacttcatccaagtgttatatacaggtcactggtatgacttgtgcttcctgtgtagcaaacattgaacggaatttaagacgagaagaaggaatatattccatacttgtggctctgatggctggcaaggcagaagtaaggtataaccctgctctcatacaacccccagtgatagccgagttaatccgagagcttggatttggatccactgtgatagaaaatgctgatgaaggagatggtgttttggaacttgttgtgagaggaatgacatgtgcctcctgtgtccataaaatagagtctaccctcacaaaacacagagggatcttctactgctctgtggccctggcaaccaacaaagcacatattaaatatgatccagaaattattggtcccagagatattattcatacaattgaaagcttgggttttgaagcttctttggtcaagaaggaccggtcagcaagccacctagaccataaacgggaaataagacagtggcgacgggcctttcttgtgagcctatttttctgtatacctgtaatgggactgatgatatatatgatggttatggaccaccatcttgcaagtcttcaacataatcagaacatgagccaagaagaaatgatcaacattcattcttctatgttcctggagcgccagatcctgccaggattgtccattatgaatttgctatcttttttattgtgtgttcctgtacagttttttggaggctggcacttctatattcaggcctacaaagcactgaagcataaaactgcaaatatggatgtattgattgtgctggcaacaaccattgcatttgcttactctttggttattcttctggttgcaatgtatgagagagccaaagtgaaccctgttactttctttgacacacctcctatgctatttgtgtttattgcactaggccggtggctggaacatgtagcaaagggcaaaacatcagaggctcttgccaaactaatttcactacaagctacagaagcaactattgtaactcttgactctgataatatcctcttgagtgaagagcaagtggatgtggaacttgtacaacgtggagacattattaaagtggttccaggaggcaaatttccagtggatgggcgtgttattgaaggacattctatggtagatgagtccctcatcacaggagaggcaatgcctgtggccaagaaatctggaagcacagtgattgctggttccattaaccagaatgggtcactccttatccgtgcaacccatgttggagcagacacaaccctttctcaaattgtcaaacttgtagaggaggcacaaacatcaaaggctcctatccagcagtttgcagacaaactcagtggctactttgttccttttattgttattgtttccattgctacccttttggtttggattataattggatttctgaattttgaaatcgtggaaacctactttcccggctacaacagaagtatctcccgaacagaaacaataatacgctttgctttccaagcctctatcacagttctatgcattgcatgcccctgttccctgggactggccactccaactgctgtgatggtgggtacaggagtaggtgctcaaaatggcatactaatcaaaggtggtgagccattggagatggctcataaggtaaaggtagtggtatttgataaaactggaaccattacccatggaaccccagtagtgaatcaagtaaaggttctagtggaaagtaatagaatatcacgcaataagatcctggctattgtgggaactgctgaaagtaacagtgaacaccctctgggagcagccataacgaaatactgcaagcaggagctggatactgaaaccttgggtacctgcatagatttccaggttgtgccaggctgtggcattaactgtaaagtcaccaatatcgaagccttgctacacaagaataactggaagatagaggaaaataatattaaaaatgcatccctggttcaaatagatgagagtaatgaacagtcatcaacttcgtcttccatgattattgatgctcagttctcaaatgctcttaatgctcagcagtacaaagttctcattggcaaccgggagtggatgattagaaatggtcttgccattaataacagtgtaaatgattccatgactgaacatgagagaagaggtcggactgctgtactggtagcagttgatgatgagctgtgcggtttgatagctattgctgatacagtgaagcctgaagcagaactggctgtccatattctgaaatctatgggcttagaagtagttctgatgactggagacaacagtaaaacagctagatctattgcttctcaggttggcattactaaagtgtttgctgaagttctaccttcccacaaggttgctaaggtgaagcaacttcaagaggaggggaaacgggtagcaatggtaggagatggaatcaatgactccccagctctggcgatggctaatgttggaattgctattggcacaggcacagatgtagccattgaagcagctgatgtggttttaataaggaatgatcttctggatgtagtggcaagtattgatttatcaaggaagacagtcaagaggattcggataaattttgtctttgctctaatttataatctgattggaattcctatagctgctggagtttttatgcccattggtttggttttgcaaccctggatgggatctgctgcaatggctgcttcatctgtttcagtagtactttcttcactcttccttaaactttacaggaaaccaacttatgagaattatgaactacatgctcgaaaccaaatgggacagaaaagtccttcagaaataagtgttcatgttggaatagatgatacctcaagaaattctcctaaactgggtttgctggaccgaattgttaattacagcagagcctccataaattcactactgtctgataaacgatcactaaacagcgttggtaccagtgaacctgacaagcactcactcctggtcggagactgcagggaagatgacgacagtgcgttgtaa

SEQ ID NO: 142 - protein, 1500 aa, Bovine
MDLSVSVNSVTISVEGMTCSSCVWTIEQQIGKLNGVHHIKVSLEEKNATVIYDPKLQTPKTLQEAIDDMGFDAILHNPKPLPVLTETVFLTVTASLVPPWDHIQSTLLKTKGVTDIKISPQQRTAVVTIIPSIVNANQIVELVPDLSLDTGTLEKKSGTCEDYSMAQPGEVMLKMKVEGMTCHSCTSTIEGKIGKLQGVQRIKVSLDNQEATVVYQPHLITAEEIKKQIEVVGFTAFIKKQPKYLKLGAIDIERLKNTPVKSSEGSQQKSPSYTSNSTVIFTIDGMHCKSCVSNIESALSTLQHISSVVVSLENKSAIVKYNASLVTPETLRKAIEAISQGQYRVSSASEIESTSNSPSSSSLQKSPLNIVSQPLTQETVINIDGMTCNSCVQSIEGVISKKAGVKSIQVSLANGKGTVEYDPLLTSPETLREAIENMGFDASLSDTNEPLVVIAQPSSEMPLLTSTNEFHTKMMTPIHDKEEPKTSSKCYIQVTGMTCASCVANIERNLRREEGIYSILVALMAGKAEVRYNPALIQPPVIAELIRELGFGSTVIENADEGDGVLELVVRGMTCASCVHKIESTLTKHRGIFYCSVALATNKAHIKYDPEIIGPRDIIHTIESLGFEASLVKKDRSASHLDHKREIRQWRRAFLVSLFFCIPVMGLMIYMMVMDHHLASLQHNQNMSQEEMINIHSSMFLERQILPGLSIMNLLSFLLCVPVQFFGGWHFYIQAYKALKHKTANMDVLIVLATTIAFAYSLVILLVAMYERAKVNPVTFFDTPPMLFVFIALGRWLEHVAKGKTSEALAKLISLQATEATIVTLDSDNILLSEEQVDVELVQRGDIIKVVPGGKFPVDGRVIEGHSMVDESLITGEAMPVAKKSGSTVIAGSINQNGSLLIRATHVGADTTLSQIVKLVEEAQTSKAPIQQFADKLSGYFVPFIVIVSIATLLVWIIIGFLNFEIVETYFPGYNRSISRTETIIRFAFQASITVLCIACPCSLGLATPTAVMVGTGVGAQNGILIKGGEPLEMAHKVKVVVFDKTGTITHGTPVVNQVKVLVESNRISRNKILAIVGTAESNSEHPLGAAITKYCKQELDTETLGTCIDFQVVPGCGINCKVTNIEALLHKNNWKIEENNIKNASLVQIDESNEQSSTSSSMIIDAQFSNALNAQQYKVLIGNREWMIRNGLAINNSVNDSMTEHERRGRTAVLVAVDDELCGLIAIADTVKPEAELAVHILKSMGLEVVLMTGDNSKTARSIASQVGITKVFAEVLPSHKVAKVKQLQEEGKRVAMVGDGINDSPALAMANVGIAIGTGTDVAIEAADVVLIRNDLLDVVASIDLSRKTVKRIRINFVFALIYNLIGIPIAAGVFMPIGLVLQPWMGSAAMAASSVSVVLSSLFLKLYRKPTYENYELHARNQMGQKSPSEISVHVGIDDTSRNSPKLGLLDRIVNYSRASINSLLSDKRSLNSVGTSEPDKHSLLVGDCREDDDSAL

SEQ ID NO: 143 - DNA, 1335 bp, Bovine
atgaaattcccgggctcggtgctggcgtccgtgttcctgttcgtggccgagacgtcggcggcgctgtacctgagcagcacctaccgctcgggcggggacggcatgtggcaggcgctgacgctgcttttctcgctgctgccctgcgctctggtgcagctcacgctgctcttcgtgcaccgcgacttcacccgcgaccggccgctcgtgctgctgctgcacctgctgcagcttgggcccctcttcaggtgttttgaagtcttctgcatctattgtcagtcaaaccacattgaagaaccttatgtcagcatcaccaagaagcggcagataccaaaaaatggccactcagaggaaattgagaaggaagtgggccaggcagagggcaagctattcacccaccgatctgcattcagccgggcatcggtgatccaggctttcctgggctcagccccacagctgaccctgcagctgtacataagtgtcttgcagcaggatgtcagtatcggacgatgtctgttcatggtcctttccctattgtccattgtgtacggagccttgcgctgtaacatcctagccatcaagatcaaatacgatgaatatgatgtcaaggtgaagcccctggcctatgtctgtatcttcctctggaggagctttgagattgtcacccgagtcattgtcctggtcctctttacctctgtcctgaaggcctgggtggtcatagacatactcatcaacttcctcggcttcctcttctacccctggatcctcttctggtgcagtggctcccccttccctgagaactttgagaaggccttcagtcggctgggcaccaccattgtgctgtgcttcctcaccctcctctacgccgggatcaacatgttctgctggtcggcggtgcagctgaaaatcaacaaccccgacctcatcagcaagtctcagaactggtaccggctcctggtgtactacatggtgaggttcatcgagaacgccttcctcctcctcatgtggtatctttacaagactgacatctatatgtatgtgtgtgcacccctgctgatgctgcagttgctcattgggtactgcacggccattctgttcatggttgtgttctatcagttcttccacccttgcaaaaagctcttttcccccaatgcttctgaaagctttcaggagtggctaaagtgtgcctgttgtaaccgcaggcggcgggaatcctgcgagtctgcagaaaatacagacctaaggtcacccacagacagagaggagaccccttctagcagtaaaataagttccatgcctagccagatcttgaatactgatgagctctcttctgcttaa

SEQ ID NO: 144 - protein, 444 aa, Bovine
MKFPGSVLASVFLFVAETSAALYLSSTYRSGGDGMWQALTLLFSLLPCALVQLTLLFVHRDFTRDRPLVLLLHLLQLGPLFRCFEVFCIYCQSNHIEEPYVSITKKRQIPKNGHSEEIEKEVGQAEGKLFTHRSAFSRASVIQAFLGSAPQLTLQLYISVLQQDVSIGRCLFMVLSLLSIVYGALRCNILAIKIKYDEYDVKVKPLAYVCIFLWRSFEIVTRVIVLVLFTSVLKAWVVIDILINFLGFLFYPWILFWCSGSPFPENFEKAFSRLGTTIVLCFLTLLYAGINMFCWSAVQLKINNPDLISKSQNWYRLLVYYMVRFIENAFLLLMWYLYKTDIYMYVCAPLLMLQLLIGYCTAILFMVVFYQFFHPCKKLFSPNASESFQEWLKCACCNRRRRESCESAENTDLRSPTDREETPSSSKISSMPSQILNTDELSSA

SEQ ID NO: 145 - DNA, 3491 bp, Bovine
atcacaggggttggtacaagtagtgtgataatttgcagtgttctctctgtgacttacctgctattgtgttagcaaatttctgggtgtcggtatgcagagggtcccaccttcctctcctgcctctgagtgtgctggagaagagaagcgagttggtacgcgcacagtatttgttggcaatcatccagtttcagaaactgaagcatacattgcacaaaaattttgtgataatagaataatctcatctaagtatacactttggaatttcctcccaaagaatctgtttgaacagtttagaagaattgcaaatttttattttcttataatttttcttatacaggtaacagtagacacaccaactagcccaattaccagtggacttccacttttcttcgttataactgttacagccatcaagcagggatatgaggattggctgaggcacagggccgacaatgaagtcaataaaagcactgtttacattattgaaaatgcaaagcgagtgaaaaaagagagtgaaaaaatcaaggtcggtgatatagtagaagtacaggcagatgaaacctttccctgtgatcttattcttctgtcatcctgcacagttgatggaacctgttatgttaccacagccagtcttgatggggaatcgaattgcaagacacattatgcggtacgtgataccattgaactgcgtacagtcgaatccattgataacctcagagcagcaattgaatgtgaacagcctcaacctgacctctacaagtttgttggccgaatcaatatctatagtaatagtattgaagctgttgccaggtctttgggacctgaaaatctcttgttgaaaggagctacactaaaaaataccaagaagatatatggagttgctgtttacactggaatggaaaccaaaatggcattgaactaccaagggaaatctcagaaacgttctgctgttgaaaaatccattaatgctttcctgattgtgtatttatttatcttactgaccaaagctgcaatatgcactactctaaagtatgtttggcaaagtaccccacataatgatgaaccttggtataaccaaaagacccagaaagaacgggaaacttggaaggttttaaaaatgttcactgacttcctgtcatttatggttctgttcaactttatcattcctgtctccatgtatgtcacagtagaaatgcaaaaattcttgggctccttcttcatttcatgggataacgacttctatgatgaagaaattaatgaaggagccctggtaaacacatcagaccttaatgaagaacttggtcaggtggattatgtatttactgataagactggaacacttactgaaaacaccatggaattcattgaatgctgcatagatgggcataagtataaaggtgtagctcaggagactgatggactctctcaaactgatggacccttaccatatttggacagagctgataagaatcgagaagagctctttctgcgtgccttgtgtttatgtcacactgtagaagttaaaccaaatgatactgttgatggagttacagagtcatctgaattaacctatatgtcatcttcaccagatgaaatagctttggtcaaaggagctaaaaagtatggattcacatttgtaggtgttcagaatggctatatgagagtagagaaccaaagaaaagaaatagaagagtatgaacttcttcacaccttaaactttgatgctgtccgccgtcgtatgagtgtaattgtgaagactcaaacaggagatatacttctcttttgtaaaggagccgactcagcagttttccccagggtacaaaatcatgaaatcgacttaattaaagtccatgtggaacataatgcgatggaggggtatcggacactttgtatagccttcaaagaaattgctccagatgattatgaaagagttaacagacagctcatagaggcaaaaatggccttacaagacagagaagaaaaaatggaaaaggttttcgatgagattgagacagacatgcatttaattggagccactgcagtggaagacaagctacaagatcaagccgctgagaccattgaagccctgcatgccgcaggtctgaaagtctgggtgcttactggcgacaagatggagactgcaaaatccacctgctatgcctgccgccttttccaaaccaacaccgagctcttggaactgaccaccaagacaattgaagaaagcgaaaggaaagaggatcgattacatgagttgttgactgaatatcgtaagaagctgctgcatgaatttcctaaaagtactagaagccttaaaaaagcgtggacagaacatcaggaatacggattaatcattgatggctccactctgtctcttatattaaactctagtcaagactctggttctaacaattacaaaagcattttcctacagatctgcatgaagtgcacagcagtgctctgctgtcggatggccccgttacagaaagctcagattgtaagaatggtgaagaatttaaaaggcagcccaatcacactgtcgataggtgatggtgccaatgatgttagcatgatcttggaatcccatgtgggcataggtattaaaggcaaagaaggtcgccaagcatccaggaatagcgattatgcggtcccaaaatttaaacatttaaagaaactgctgttggctcatggacatctatattatgtgagaattgcacaccttgtccagtatttcttctataagaacctttgtttcattttgccacagtttttgtaccagttcttctgtggattctcacagcagccactgtatgatgctgcttaccttacaatgtacaatatctgcttcacatccttgcccatcctggcctacagtctactggaacagcacatcaatattgacacattgacctcagatccccgattgtacatgaaaatatctggaaacgccatgctacagttgggcccattcctatactggacatttctggctgcatttgaaggaaccgtgtttttctttgggacttactttctttttcagactacatccttagatgaaaatggaaaggtatatggaaattggacatttggaaccattatttttacaatcttggtattcaccgtaactctgaagctcgccttggatactcgtttctggacatggatcaaccaccttgtgatttggggttctttagcattttatgtatttttctcattcttctggggaggaattatatggccattcttgaaacaacagagaatgtattttgtatttgctcaaatgctgtcatctgtatccgtatggttgaccataattcttctaatatttgtcagcctttcccccgagatgctcaggattgtattaaggagtgtaagaagaagaagtaccaggagcaatctaagctgtaaaaaggcatctgactcattatccaccagaccttcagtcagacctcttcttttacgaacattctcagatgaatctaatatattttaac

SEQ ID NO: 146 - protein, 1132 aa, Bovine
MQRVPPSSPASECAGEEKRVGTRTVFVGNHPVSETEAYIAQKFCDNRIISSKYTLWNFLPKNLFEQFRRIANFYFLIIFLIQVTVDTPTSPITSGLPLFFVITVTAIKQGYEDWLRHRADNEVNKSTVYIIENAKRVKKESEKIKVGDIVEVQADETFPCDLILLSSCTVDGTCYVTTASLDGESNCKTHYAVRDTIELRTVESIDNLRAAIECEQPQPDLYKFVGRINIYSNSIEAVARSLGPENLLLKGATLKNTKKIYGVAVYTGMETKMALNYQGKSQKRSAVEKSINAFLIVYLFILLTKAAICTTLKYVWQSTPHNDEPWYNQKTQKERETWKVLKMFTDFLSFMVLFNFIIPVSMYVTVEMQKFLGSFFISWDNDFYDEEINEGALVNTSDLNEELGQVDYVFTDKTGTLTENTMEFIECCIDGHKYKGVAQETDGLSQTDGPLPYLDRADKNREELFLRALCLCHTVEVKPNDTVDGVTESSELTYMSSSPDEIALVKGAKKYGFTFVGVQNGYMRVENQRKEIEEYELLHTLNFDAVRRRMSVIVKTQTGDILLFCKGADSAVFPRVQNHEIDLIKVHVEHNAMEGYRTLCIAFKEIAPDDYERVNRQLIEAKMALQDREEKMEKVFDEIETDMHLIGATAVEDKLQDQAAETIEALHAAGLKVWVLTGDKMETAKSTCYACRLFQTNTELLELTTKTIEESERKEDRLHELLTEYRKKLLHEFPKSTRSLKKAWTEHQEYGLIIDGSTLSLILNSSQDSGSNNYKSIFLQICMKCTAVLCCRMAPLQKAQIVRMVKNLKGSPITLSIGDGANDVSMILESHVGIGIKGKEGRQASRNSDYAVPKFKHLKKLLLAHGHLYYVRIAHLVQYFFYKNLCFILPQFLYQFFCGFSQQPLYDAAYLTMYNICFTSLPILAYSLLEQHINIDTLTSDPRLYMKISGNAMLQLGPFLYWTFLAAFEGTVFFFGTYFLFQTTSLDENGKVYGNWTFGTIIFTILVFTVTLKLALDTRFWTWINHLVIWGSLAFYVFFSFFWGGIIWPFLKQQRMYFVFAQMLSSVSVWLTIILLIFVSLSPEMLRIVLRSVRRRSTRSNLSCKKASDSLSTRPSVRPLLLRTFSDESNIF

SEQ ID NO: 147 - DNA, 2078 bp, Bovine
ggagaaggcggagaccgtcccagcgggaggcgacggcagggcgggctctgggagtcggggcgagcccgagctcgtcaccccctcgtgctgcgccggtcgtagcgtcctgctggccagttccgcgtcgccctgcgctgctgcagccgccgcggaactatggctgtgctcgtcgtgttcctgtccttcttggtggcggatgtctttgggaacgaattcagtatattaagatcaccagggtctgttgttttccggaatggaaattggcctattccaggagagcgaatcccagacgtggctgcattgtccatgggcttctctgtgaaagaggatctttcttggccgggccttgcagtaggtaacctattccaccgtcctcgggctactgttatggtgatggtgaaaggagtggacaagcttgctctacccccaggcagtgtcatttcgtaccctttggagaatgcagttccttttagtcttgacagcgtggcaaattccattcactccttattttctgaagaaactcctgtggttttgcagttggctcccagtgaggaaagagtgtacatggtggggaaggcaaactcagtttttgaagatctctcagtaacgctcagacagctccgcaatcgactgtttcaagaaaactctgttctcacttcacttcccctcaattctctgagtaggaacaatgaagttgatctcctttttctttctgaactgcaagtgctacgtgatatttcaagtttgttgtctcgacataagcatctagccaaggatcattctcctgatttatactcactggagctagcaggcctggatgaaattgggaaacactatggggaagactctgaacaatttagagatgcctctaagatccttattgatgctctgcaaaagtttgcagatgacatgtacaatctctatggtgggaatgcagtggtagagttagtgactgtcagatcattcgacacatcccttgtgaggaagacgaggaatatccttgagacaaaacaagtgaaggacccctcaactacctataaccttgcatataaatataattttgaatatcccgtggttttcaacctggtactttggataatgatcggcttggccttgactctgattgtcacctgttacaatatttggaacatggatcctggatatgatagcatcatttataggatgacaaaccagaagattcgaatggattgaactttccttatgacaaacttggaaagaaagagggtttgaaaattggctctttcattaaaataaatcttttagtgtagtttaaactagatagtacactttaaatttataaaaaaaacaaacaaacagattttgttctcttttgtgtgtgcctgtgatgttcttttagagtgagttatatagtattgatgtgagttgacttgtgtgatatagattccataatatgcttaaatacgatgatataaccatttaatataatttcattccatctactatttggaaatatgcactgtaataaatgtaaaacatttagaatagtttgtgttatttatgtcgggaaaatgcactgaatttgaaatgtttaacttccttacacaggacaggttaaaagtgacatttgggctgttatatactatgaaccatttgtaaatgtcttaatgtaaatatctctgaaacaagaaaaggtttttaacttcaagcagctattaagtatgaatgtgcttccacagtcattcacattttcaattgcatctgattgacagatgatagctgttttttttaatctcttctgaaattttggtgatctgaatggtcaagtgtggatattaaacatactacattaatgtaagaaggaactagctttgtggcgttaagacacttgtaatcatatacacaaaaacatttgggggacatcttggggcatgatttcagtcatttttccccttgtgtaagttactctggtttacggtacaaaattgttctatatagaatgttaagttgttaagtggaagtagatactccctactttttatgtgaaagtggaccaatgtctataaagagtgacaaataaagttaataatgattcaaaa

SEQ ID NO: 148 - protein, 351 aa, Bovine
MAVLVVFLSFLVADVFGNEFSILRSPGSVVFRNGNWPIPGERIPDVAALSMGFSVKEDLSWPGLAVGNLFHRPRATVMVMVKGVDKLALPPGSVISYPLENAVPFSLDSVANSIHSLFSEETPVVLQLAPSEERVYMVGKANSVFEDLSVTLRQLRNRLFQENSVLTSLPLNSLSRNNEVDLLFLSELQVLRDISSLLSRHKHLAKDHSPDLYSLELAGLDEIGKHYGEDSEQFRDASKILIDALQKFADDMYNLYGGNAVVELVTVRSFDTSLVRKTRNILETKQVKDPSTTYNLAYKYNFEYPVVFNLVLWIMIGLALTLIVTCYNIWNMDPGYDSIIYRMTNQKIRMD

SEQ ID NO: 149 - DNA, 654 bp, Bovine
tacacatctaccatgtccttgctcatcaacagcgccaattgccaaatagtaggttttgcagtagccactattggatggatcctcggcaccactgccatgggcttcgtggagtggcgagtatggtatctagacaacgcctcacaattctctggtctggcctgcatgggaatgtggagagtctgtgtcttccgtcaaaccaacatcaccacagctacctcatgtcacagttacagctaccatgatacttacctacctcttgatatccgtgtttctcaacacctcttactgatggccagcattctaggactcttggggaaagcctctgttacttttgcacttaaaaatgtgtccatgggaattcttgagaatactactacctacaaagcatttgtcatttcaggaattctccacatagctgctggtatctgtatctcagttgctgtcatctggaattaccactctgtgatgactgaagagggcattgtcttcccaccatctttcaatatacccttcaagccatatgctcagaaaattggcaacactgttatagtggcatgtctagctgcctttgcgctgttcttaggtgggtggttttttctctcttacaaattacccctggataaccaggtgcatcctgaagtatcaggaatgtag

SEQ ID NO: 150 - protein, 213 aa, Bovine
MSLLINSANCQIVGFAVATIGWILGTTAMGFVEWRVWYLDNASQFSGLACMGMWRVCVFRQTNITTATSCHSYSYHDTYLPLDIRVSQHLLLMASILGLLGKASVTFALKNVSMGILENTTTYKAFVISGILHIAAGICISVAVIWNYHSVMTEEGIVFPPSFNIPFKPYAQKIGNTVIVACLAAFALFLGGWFFLSYKLPLDNQVHPEVSGM

SEQ ID NO: 151 - DNA, 1083 bp, Bovine; identical to SEQ ID NO: 37

SEQ ID NO: 152 - protein, 358 aa, Bovine
MHTTLPESTSENFEYYDLAEACDMGDIVALGTVFVVILYSLVFAFGLVGNLLVVFALINSQRSKSITDIYLLNLALSDLLFVATLPFWTHYVINEQGLHHATCKLITAFFFIGFFGGIFFITVISVDRFLAIVLAANSMSNRTVQHGVTTSLGVWAAAILVATPQFMFTREKENECFGDYPEILQEIWPVILNTEINFLGFLLPLLIMSYCYFRIMQTLFSCKNHKKAKAIRLIFLVVVVFFLFWTPYNVMIFLQTLNLYDFFPKCDVKRDLKLAISVTETIAFSHCCLNPLIYAFAGEKFRRYLYRLYRKCLAVLCCHPDHLSFSSSLSESQRSRRESVLSSNFTHYTSDGDASILL

SEQ ID NO: 153 - DNA, 480 bp, Bovine
atgtggtccctcaaatcgttcttgtgcttatccattgttgtttcctgtgtctacgccttaatgtttacttctctgacagagaaagttaaagaaatccagtggaaggtgctctgcagaggacactttttaattcagcagaatctacaagagcaagcccaagactggcttgagatcacgttgctctggcttttcttcattgtgctgatgtacgtgacagtgaagttggcaggagagaatggcgagagtagagtgcagacttctcatgcccttcagggccgttcatttggctttcttggaaataaaaaggtaaagacttcctctaaagaagtctacatgttccataccttaaccctgctcgagatggaccttgtgaaatttgtgtgcagggtgcagaatctgaaactcgccacatcaaccagcggtaacatcaaccccctcaatgtcaaggttcctgcagatgtatcagttcaggggcaatga

SEQ ID NO: 154 - protein, 159 aa, Bovine
MWSLKSFLCLSIVVSCVYALMFTSLTEKVKEIQWKVLCRGHFLIQQNLQEQAQDWLEITLLWLFFIVLMYVTVKLAGENGESRVQTSHALQGRSFGFLGNKKVKTSSKEVYMFHTLTLLEMDLVKFVCRVQNLKLATSTSGNINPLNVKVPADVSVQGQ

SEQ ID NO: 155 - DNA, 555 bp, Bovine
cagctcacgatgcgctctgtaatatggttatttttttggcctacgcttatctcgtttgtctttgcctatgtgttttatgttctgagagatgaagccgaagaactgccgtggatggtgcccagtggaaggcacttccgcgttcggcagaatcaaccagagtatgccccaggctggtttgggagcaagtggcactggctgttaatcttcctcatgtttttggtgatcctgaagtttcctggaggcgatgacgaaagtaatgcgggcactcctcctggccgtcagggctgttcatctggctctccaggaagaaagaagataagggattccccctacaaagagtctatgtgcggtgccttaacccagtccgagacgtcactgatgaaccttatgtccagggtgaagaatatgaaactcactgcggcaaccggtgatcaatgccaatgtcccaatatcgaggttcctggtgacgcacggaataatgttacaatacttgaggtatgggacaccggagaccctgatgaagtggattttcgcatcaaagaagaaaaggagtag

SEQ ID NO: 156 - protein, 181 aa, Bovine
MRSVIWLFFWPTLISFVFAYVFYVLRDEAEELPWMVPSGRHFRVRQNQPEYAPGWFGSKWHWLLIFLMFLVILKFPGGDDESNAGTPPGRQGCSSGSPGRKKIRDSPYKESMCGALTQSETSLMNLMSRVKNMKLTAATGDQCQCPNIEVPGDARNNVTILEVWDTGDPDEVDFRIKEEKE

SEQ ID NO: 157 - DNA, 1045 bp, Bovine
cttctgggtcttgggcggccattagagagggagtacctcagcgtggcagccaccccgaattatgcctactgatagaaagtcgacccgggggaggattcggtcgaggacccgggcaaggatccgagcactgcggcgggcgcgctccaagaaggtcaatttgggaggggagagcagtgcggagaaccgtgcggagaacccagcgatggggtcacagcctaggggtagcatggcgtccgcacagcagtctagggggcaggccgcatctgtgcacggcgtccggggtgggacacgccggtctacactaaaggtgtgggtcagccagcgcttcgggctgttcctgctaggtttctggttcctcctgctgctgtgcttctacatgagtactgggtatatggattctgtatctgcaaataactatattctgtggagcagtgaaaatgctgatggacaatctctgaatgaaacttctgccttgagatctctgataagatttttctttccaacaacatgcgttccagtggagggtcaggtgctaacgccttgcaagcaggggcaagatcttaacaaggatgaatgtttgaaatacaaatgctgttactcttcaatcgagaccgctacggttagctgttttgcccctctgagagacaagcctacgcagatgttccggatgtttgggtttggtgcgatgagcatggtcttcctgggatgtctgcccatgtattgctgctctttttgctggaagagtagatgggctggtcttttacgaagaagattcaacagaactttaaagcgtttgaagaaacacagaaagaaaccaaagagggatactgaaatgttggaaacagcagtggatgaggaaggatatggtgatgaaaaggaccaggagactacagcattattttcccagtgagaagaacgcgtacctttcagagaagaggagactgtcccagtcatctaaatctgctggaacgttttagaaggataaaaacttttgttgtgcttattttcaaatataaaataaagttgtagtttagttttgtgcatc

SEQ ID NO: 158 - protein, 282 aa, Bovine
MPTDRKSTRGRIRSRTRARIRALRRARSKKVNLGGESSAENRAENPAMGSQPRGSMASAQQSRGQAASVHGVRGGTRRSTLKVWVSQRFGLFLLGFWFLLLLCFYMSTGYMDSVSANNYILWSSENADGQSLNETSALRSLIRFFFPTTCVPVEGQVLTPCKQGQDLNKDECLKYKCCYSSIETATVSCFAPLRDKPTQMFRMFGFGAMSMVFLGCLPMYCCSFCWKSRWAGLLRRRFNRTLKRLKKHRKKPKRDTEMLETAVDEEGYGDEKDQETTALFSQ

SEQ ID NO: 159 - DNA, 2058 bp, Bovine
atgacctttcgggcgctaaggacccttctgctcttcagtatactgctttggggctatgtgttccagggctgtggtccttccccttgcaagacatctgtgtgtcaggacctcctggatctctacttggcctctgggaacaccagtgtggccccctgcactgatttctttagctttgcctgtggaaacatcaacaggactggcagtccttttcaggctcttgcagaggagaacaagcgacgagttcgaagaatcctggaaaccccaggttcctggcgcctggcccctggggaggagaaagcctttgaattctacaactcctgcatgaacatgagtgccattgaggcagcaggggccagtcccttcagacaggttattgaggagcagcttggcggctggtcgatcttcggtaactggactccgttagattttaaccaaactctgagccttctgatgagtcaatatggtcacttcccattcttcagagcctatttgaaacctcttcccacccctccatacttgccagtcatccaggtgatagaccagccagagcttgacgttctcctcaagcaaaaacaggaaccgaactatgcccagatcctgcgggaatacctgagttacctgaatcgcctggtaaccttgctgggaggagacccaaccaaagtgggaaacgatgcctcctattccctcttcattaactcacagctgaaccagttcctgaggcctggggagcagcagcaggcccagggcaaggtcttcgagatggtcacaattgaccagttgcagagagtggcccctgccatcgactggttgtcctgcttgcaagcaacgttcgcaccgatgtccctgagcccctcttattgcgtcgcagtccatgacctggagtatttgaaaaacatgtcacaactgattgagaaggacctgatgaagcacagggactttctgcaaagccacataatcttcgggctggtgaagacactttctccagccctggacagtcagttccaagaggcacacagatcgctgagccagaaagtgggggaactgacaggacgcccacccatgccagtccaccctcgctggatgacgtgcgtggagaagacagaagctttcttcgagcccacactggccaccttgttcatcaaggagactttcaaacccagcacccatagtgctgccatggaattattcactaccatcaaggataccttcatctctcaccttcatacagttccctggatggatagagagacccgggcagaggcccaggacaggcttacccaactgcaggtgaagatggggccctctgagtgggccctgaagccagacccggccagacaggaatacgacgacgtgcagcttggacccagcttcctccagaccttcctgagctgcatccgctcccgccaagccagagtcatccaggggttcttgcagcctttctccagtcacaggtggcaggtgctcccctggggcctcaaggcttcctattcaatacctgaccacgtgatggtcttcccagccggactcctccaacccccatttttccaccctggctaccccagagctgtgaactttggcgctgctggcagcattatggcccgtgagctgttgcacatctttgaccagctcttactccctggaggctgcccagcctgtgacacccgtgacctgcagaaggcactgctgtgcctggaacgcctctatgctgccttaccgtcacccaagggaacctccttcaatgtctcccgcacgcttctggaggatgctgcagacgccggggcactggccatcgcactgaaggcatacaaaaagaggctagttctgttccgtggggaaaccatcctgcccaacctagacctcagcccccggcaactcttcttccgaagctatgcccaggtgatgtgtagggaccccagcacccaggatcctcaggacattcgcagccctcctacccttcgagtccacgggcccctaagcgacagtccagctttcaccagacactttcgctgtccccagggggccctcctgaacccccccagccgctgccaactctggtaa

SEQ ID NO: 160 - protein, 685 aa, Bovine
MTFRALRTLLLFSILLWGYVFQGCGPSPCKTSVCQDLLDLYLASGNTSVAPCTDFFSFACGNINRTGSPFQALAEENKRRVRRILETPGSWRLAPGEEKAFEFYNSCMNMSAIEAAGASPFRQVIEEQLGGWSIFGNWTPLDFNQTLSLLMSQYGHFPFFRAYLKPLPTPPYLPVIQVIDQPELDVLLKQKQEPNYAQILREYLSYLNRLVTLLGGDPTKVGNDASYSLFINSQLNQFLRPGEQQQAQGKVFEMVTIDQLQRVAPAIDWLSCLQATFAPMSLSPSYCVAVHDLEYLKNMSQLIEKDLMKHRDFLQSHIIFGLVKTLSPALDSQFQEAHRSLSQKVGELTGRPPMPVHPRWMTCVEKTEAFFEPTLATLFIKETFKPSTHSAAMELFTTIKDTFISHLHTVPWMDRETRAEAQDRLTQLQVKMGPSEWALKPDPARQEYDDVQLGPSFLQTFLSCIRSRQARVIQGFLQPFSSHRWQVLPWGLKASYSIPDHVMVFPAGLLQPPFFHPGYPRAVNFGAAGSIMARELLHIFDQLLLPGGCPACDTRDLQKALLCLERLYAALPSPKGTSFNVSRTLLEDAADAGALAIALKAYKKRLVLFRGETILPNLDLSPRQLFFRSYAQVMCRDPSTQDPQDIRSPPTLRVHGPLSDSPAFTRHFRCPQGALLNPPSRCQLW

SEQ ID NO: 161 - DNA, 546 bp, Bovine
atgcgctctgtaatatggttatttttttggcctacgtttatctcgtttgtctttgcctatgtgttttatgttctgagagatgaagccgaagaactgccgaggatggtgcccagtggaaggcacttccgcgttcggcagaatcaaccagagtatgccccaggctggtttgggagcaagtggcactggctgttaatcttcctcatgtttttggtgatcctgaagtttcctggaggcgatgacaaaagtaatgcgggcactcctcctggccgtcagggctgttcatctggctctccaggaagaaagaagataaggccttccccctacaaagactctatgtgcggtgccttaacccagtccgagacgtcactgatgaaccttatgtccagggtgaagaatatgaaactcactgtggcaaccggtgatcaatgccaatgtcccaatatcgaggttcctggtaacgcacggaataatgttacaatacttgaggtatgggacaccggagacccggatgaagtggattttcacatcaaagaagaaaaggagtag

SEQ ID NO: 162 - protein, 181 aa, Bovine
MRSVIWLFFWPTFISFVFAYVFYVLRDEAEELPRMVPSGRHFRVRQNQPEYAPGWFGSKWHWLLIFLMFLVILKFPGGDDKSNAGTPPGRQGCSSGSPGRKKIRPSPYKDSMCGALTQSETSLMNLMSRVKNMKLTVATGDQCQCPNIEVPGNARNNVTILEVWDTGDPDEVDFHIKEEKE

SEQ ID NO: 163 - DNA, 610 bp, Bovine
atgcgctctgtaatatggttatttttttggcctacgtttatctcgtttgtctttgcctatgtgttttatgttctgagagatgaagccgaagaactgccgaggatggtgcccagtggaaggcacttccgcgttcggcagaatcaaccagagtatgccccaggctggtttgggagcaagtggcactggctgttaatcttcctcatgtttttggtgatcctgaagtttcctggaggcgatgacaaaagtaatgcgggcactcctcctggccgtcagggctgttcatctggctctccaggaagaaagaagataaggccttccccctacaaagagtctatgtgcggtgccttaacccagtccgagacgtcactgatgaaccttatgtccagggtgaagaatatgaaactcactgtggcaaccggtgatcaatgccaatgtcccaatatcgaggttcctggtgacgcacggaataatgttacaatacttgaggtatgggacaccagagacccggatgaagtggattttcacatcaaagaagaaaaggagtagttgagtgttgacaaagtgtatccaaactaataaaagtattttgcagcaaaaggaaaaatgcctc

SEQ ID NO: 164 - protein, 181 aa, Bovine
MRSVIWLFFWPTFISFVFAYVFYVLRDEAEELPRMVPSGRHFRVRQNQPEYAPGWFGSKWHWLLIFLMFLVILKFPGGDDKSNAGTPPGRQGCSSGSPGRKKIRPSPYKESMCGALTQSETSLMNLMSRVKNMKLTVATGDQCQCPNIEVPGDARNNVTILEVWDTRDPDEVDFHIKEEKE

SEQ ID NO: 165 - DNA, 1080 bp, Equine
atggcgaccacattagatgggactgagactgtgggtgaggctgaaggaaccacaccttatgactatgatgggtcactgccatgtgaaaaaatcaacatcaagatgctggcggcccagttcctgcccccactgtattctctggtggtcgtgattggtctgctgggcaatctgatggtggtggtgatcctcacaaaatacaagaggctccggattatgaccaacatcttcctgttcaatttggcaatttctgacttgctctttcttttcactctgccattctggattcactatgtttggcgggatgagtgggtttttggccatcacatgtgtaagttcctcattgggctttgttacacgggcttgtacagcgagatctttttcatcatcctgttgacgctagaccggtatctggccatcgtccacgctgtgtttgcccttcgaacccggaccgtcacttttggcatcataaccagtgtcttcacctggggcctggcagggctagcagccctccctgaatttatcttccatgggttccaagaggaatttggtcagtatgtctgccttcctttctacccagaagcagcagaaaatatctggaagagtacccatgttctgagaatgaatatcttgagtctcgctctgcctttgctcattatggctgtctgctactcaggaatcattaaaacactgctgagatgtcctaacaagaaaaagtacaaggccatccggctcatttttgtcatcatggtggtctttttcgttttctgggcaccttacaacctggttctctttttctccacttttcaaacaaccttccttgggaccagctgtgatcagagcaaacagctggacatggccctgctggtgacagagatgatcgcctacacgcactgctgtgtcaaccctgtgatctacgcatttgttggcgagaggttccagaagaacctccaccactttttccacacgtacgtggccatctacctgtgcaaatacatcccattccttcctagtgagaaattggaaagagccagctctgtatccccatcaacaggggagcaggaactctctgctgcattttag

SEQ ID NO: 166 - DNA, 3700 bp, Equine
agatgaaggacaccatgtgatggagccacctgtcatcacggaacagtctccacggcgcctggttgtcttccccacagacgacatcagcctcaagtgtgaggccagtggcaaacccgaagtggagttccgctggactcatgatggcgttcacttcaaacccaaggaggaactgggtgtgaccgtgcaccaggagccccactctggctccttcaccatcacgggcaacaacagcaactttgcccagaggttccagggcacctatcgctgctttgccagcaataagcttggcaccgccatgtcccacgagatccagctcatggccgagggtgccccaaagtggccaaaggaaacagtgaaacctgttgaggtggaggaaggggagtcggtgattctgccttgccaccctccacccagtgcagagcctcttcggatctactggatgaacagcaagatcttgcacatcaaacaggatgagcgggtaacaatgggccagaacggcaacctctactttgccaatgtgctcacctcggacaaccactcagactacatctgcaatgcccacttccctggcacccggaccatcattcaaaaggaacccattgacctccgagtcaaggccaccaacagcatgatcagcaggaagccgcgcctgctcttccccaccaactccagcagccacctggtggccttgcagggacagccactgatcctggagtgcattgccgagggctttcccacgcccaccatcaagtggctgcgcccaagtggccccatgccatccgaccgagtcacctaccagaaccacaacaagaccctgcagctgctgaatgtgggagaggaggatgacggcgagtatcgctgcctggctgagaactcgctgggcagtgaccggcatgcctactatgtcactgtggaggctgccccgtactggctgcaaaagccccagagccatttgtatgggccaggagagaccgtccgcctggactgccaggtgcagggcaggccccaaccagaggtcacctggagaatcaatgggatccccgtggaggagctggccaaggaccagaagtaccggatccagcgtggagccctgatcctgagcaacatacagcccagtgacacgatggtgacccagtgtgaagcccgcaaccggcacggggtcctgctggccaatgcctacatctatgtcgtccagctaccagccaagatcctgaccccagacaacgagacgtacatggcagttgagggcagcactgcctaccttctgtgcaaggcctttggagcacctgtgcccagcgtccagtggctggacaaggaagggaagaccgtgctgcaggacgagcgcttcttcccttacaccgacgggaccctgggcatccgagacctccaagccaacgacactggacactacttctgccaggctgccaatgaccaaaataacgtgaccattgtggctaacctgcaggtcaaagatgccactcagatcacgcaggggccccggagtgcaatcgagaagaaaggttcaagagtgacattcacgtgccaggcctcctttgacccctccttggagcacagcatcacctggcgtggggatggtcacaacctccaggagcttggtgacagtgacaagtacatcatagaggatgggcgcctggtcatccacagcctggactacagtgaccagggcaactacagctgtgtggctggcaccaagctggatgtggtggagagcagggcagagctcctggtggtgggtgaccccgggccggtgccgcagctggagctgtctgatcatcacttgctgaagcagagccaggtgcgcctgtcttggagccccgccgatgaccacaacgcccccatcgagaagtatgacattgaatttgaggacaaggagatggcgcctgagaaatggtacagtctgggcaaggtgccagggaaccagacctccaccaccctcaagctgtcaccctatgtccactacacctttagagtcactgccatcaacaaatacggccctggggagcccagcccggcctctgagactgtggtcacacctgaggcagccccggaaaagaaccctgtggacgtgaagggggaagggaacgagaccaacaacatggtcgtcacttggaagccgctcaagtggatggactggaatgccccccaggttcagtaccgcgtgcagtggcgccctcaggggacgcgggggacctggcaggaacagatcgtgagcgaccccttcctggtagtgtccaacacgtccacttttgtgccctatgagatcaaggtccaggccgtcaacagccagggcaagggccctgagcctccgatcaccattggctactctggggaagactacccccaggcaagccctgagctggaaggcatcaagatcctcaactcaagcactgtgctggtcaggtggtggcctgtggacccagccctggtcaagggccacctccgaggatacaatgtgacgtactggtgggagggcagtcagaggaagcacagcaagaggcacgtccacaaaggccacatggtggtgcccgccaacgccaccagtgccatcctggggggcctgcggccttacagcttctaccatctggaggtccaggcctttaatggccgaggtctggggcctgcgagcgagatgaccttccacaccccagaaggagtgcccggccaccctgaagcactgcacctggagtgccagtcaaacaccagcctgctgctgcactggcagcccccactcagccacaacggcgtgctcactggctacgtgctctcctaccaccctctggacaatgggggcaaggagcagttgtcctttgaccttccggaccctgagctgcgttcgcacaacctgagcaacctcagcccccaactgcggtaccgcttccagctgcaggccaccacgaaggagggccctggcgaggccatcgtgcgggaaggaggcaccatggccctagctggaaaccgaagttttggcaacatctcggccatggctggcgagaattatagcgtggtctcctgggtgcccagggagggccgatgcaacttcgggttccagatctggttcaaagccttgggggatgagaagatgggcgctcgtctcacaccgcagtccgtcagctacaaccagagctcctacacacagtgggacctgcagcccgacacccactacgagatccacctgctcaaggagacagtgctcctgcaccagatggctgtgaagaccaatggcaccagccatgtgagactccctcctgccggcttcaccaccgagggctggttcatcggcttcgtgagcgctgctgtcctcctgctcctcgtcttgctcatcctctgcttcatcaagcgcagcaagggtggcaagtattcagtgaaggataaagaggacacccaggtggactctgaagcccggccaatgaaggacgagacctttggcgagtacaggtccttggagagtgacaatgaggaaaaggcctttggcagcagccagccatccctcaacggagacatcaagccgctgggtagtgacgacagcctagccgactacgggggcagcgtggatgtccagttcaatgaggacggctcctttattggccagtacagcggcaagaaggagaaggaggcgacaggaggcaatgacagctcaggggccgcctcccccatcaaccccgcagggaccttggagtag

SEQ ID NO: 167 - DNA, 1071 bp, Equine
atgcccacccacttccctgagccgatctcggacgattttcagtacgatgagtctgcagaagcctgtaacatggaggacatcgtggtctttgggactgccttcctgtccgtggtctactcccttgtctttgtgttcggcctggtgggaaatttgctggtgatcttttccctcagcaacagccggaagcgcaagagcatcaccgacatttacctcctgaacctggccttgtccgatctgctttttgtagccactttgcccttctggactcactatctgagaagtgaacaaggctttcacaatgccgtgtgcaaactcaccactgccttcttcttcatcgggttttttggaggcatcttcttcatcaccatcatcagcatcgataggtacctggccattgtcctggccgccaactccatgaacaaccggactgtgacgcacggcgtcaccatcagcctgggcgtctgggcagcagccatcttggtggcagcaccccagttcatgttcacaaaacaaaaagaaaatgaatgccttggtgactaccccgaggtcctgcaggacatctggcccgtgctccgcaatgtagaagcaaatgctcttggcttcctgctcccgctgctcattttgatctactgttacttcagaatcatgcggacgctgttctcctgcaagaaccgcaagaaagctaaagctattaaactgatccttctggtggtcatcgtatttttcctcttctggacaccctacaacatcatgattttcttagagacgctcaatctctacgacttctttccggattgtgacatgaaaagggatctgaaattggccatcggtgtgaccgagacaatagcatttatccactgttgcctcaatcccattatctatgcctttgctggagagaagttcagaagatacctttcccacctgtacaggaaatgcctggctgtcctgtgctgttattctgtcgacaccggtttctccccgcctgagtcacaaacaggcaggcgggaaagcattctgagcagcaattttacccactacaccagtgatggagaggtgtccctccatgtctga

SEQ ID NO: 168 - DNA, 579 bp, Equine
gtgggatggatcctctccaccatttgcatgggctttgcggagtggcgagtgtggtacatgaacaacacctcactcctcccctcgggcctggcccgtgtgggaatgtggaaaatctgcatttactaccatgctgacaacttctacagagccacatcgtgttaccattacacctactgtgatacttttctccctcttgatattcgtattgctcaaaacctcctgctgatcgccagcattctagggctcttggggaaagcctccatcacctttgcacttaggaatgtgtacatgggaattcttaggaagaatgccacctgcaatgcatttgttgcttcaggaattctgaacatagctgctggtgtctgtatctccgtagctgtgacctggaattaccactcagtgatgaatgaagaggaaattgccttcccaccatatttctatgtgcccttcaagccggatgctcaggaaattggcaatgccattatcgtggcatgtctggctgccttcctgatgttgttaagtggactgtgtttcctctcttataaattccccctggacagccacgtgtgtcctgaaatt

SEQ ID NO: 169 - DNA, 3792 bp, Equine
ttccagggatcacaggagttggtacaaattgcttgataatctgcagcgttctctctaggatttagctgccattgtgttagcaaattttcacatgttggtaggcagatggtcccacctttaccctcgcacctgtcagtgtgctggagaagagaaacgagttggtacacgcacagtgtttgttggccatcatccagtttcagaaacagaaacttatgttgcacaaaaattttgtgataatagaatagtctcatctaagtatacactttggaatttcctcccaaagaatctgtttgaacagtttagaagaattgcgaatttttattttctcatcattttccttgtacaggtcacagtagatacaccaactagcccagttaccagtggacttccacttttctttgttataactgttacagccatcaagcagggttatgaggattggctgagacacagagctgacaatgaagtcaacaagagaactgtttacattattgaaaatgcaaaacgagtgagaaaagagagtgaaaaaatcaaggtcggtgatgtagtcgaagtacaggcagatgaaacctttccctgtgatcttattcttctatcatcctgcactagtgatggaacctgttatgttactacagccagtcttgatggggaatccaattgcaagacacattatgcggtacgtgataccattgcactgtgtacggctgagtccattgataccctccgagcagcaattgaatgtgaacagcctcaacctgacctctataagtttgttggacgaatcaatatccgtaataataatcttgaggctgttgccaggtctttgggacctgaaaatctcttgttgaaaggagctacattaaaaaataccaagaagatatatggagttgctgtttacactgggatggaaactaaaatggctttgaactaccaaggcaaatctcagaaacgttctgctgttgaaaaatccattaatgccttcctgattgtgtatttatttatcttactgaccaaagctgctgtatgcactacgctaaagtatatttggcaaagtatcccatataacgatgaaccttggtataaccaaaagacccagaaagagcgggagactttcaaggttttgaaaatgttcaccgacttcctgtcatttatggttctattcaactttatcattcctgtctccatgtatgtcacagtagaaatgcagaaattcttgggctccttcttcatttcatgggataaggacttttatgatgaagaaattaatgaaggagccctggttaacacatcagaccttaatgaagaacttggtcaggtggattatgtgtttacagataagactggaacactcactgaaaacagcatggaattcgttgaatgctgcatagatgggcacaaatataaaggtgtaactcaggaggctgatggactctctcaaactgatggacccttaacatattttgacaaagcagataagaatcgagaagagctctttctgcgtgccttgagtttatgtcatactgtagaaattaaaacaaatgatgctgttgatggagctccagaatcgtctgaattagcctatatgtcctcttcaccagatgaaatagctttggtgaaaggagctaaaaagtatgggttcacatttgtgggaattcataatggccatatgagagtagagaaccaaagaaaagaaatagaagagtatgaactacttcataccttaaatttcgatcctgtccgccgtcgtatgagtgtaattgtgaagactcaagcaggagacatacttctcttttgtaaaggagcagactcagcagttttccccagggtgcaaaatcatgaaattgagttaactaaagcccatgtggaacgtaatgcggtggatgggtatcggacactctgtgtggccttcaaagaaattgctccagatgattatgaaaggattgaccgacagcttatagaggcgaaaatggccttacaggacagagaagaaaaaatggaaaaggtttttgatgatattgagacaaacatgaatttaattggagccactgcagtggaagacaagctccaagatcaagcagctgagaccattgaagctctccatgctgcaggtctgaaagtctgggtgcttactggggacaagatggagacagccaaatccacctgctatgcctgccgccttttccaaaccaacacagagctcttggaactgaccacaaaaaccatcgaagaatgtgaaaggaaagaagatcgattacatgaattgttaatagaatattgtaagaagttgcggcatgaatttcctaaaggttctagaaaccttaaaaaagcatggacagaacatcaggaatatggattgatcattgatggctccacattgtcactcatattaaattctagtcaagactccagttctaacaattacaaaagtgtttttctacagatttgcatgaagtccactgcagtgctctgctcccgtatggcaccgttacagaaagcccagattgtcagaatggtgaagaatttaaaaggcagcccaataacactgtcgataggtgatggtgccaatgatgttagtatgatcttggaatcccatgtgggaataggtattaaaggcaaagaaggtcgccaagcagccaggaatagcgattattctgttccaaagtttaaacatttgaaaaaactgctattggctcatgggcatctatattatgtgagaatagcacaccttgtacagtatttcttctataagaacctttgtttcattttgccacagtttttataccagtttttctgtggattctcacaacagccactgtatgatgccgcttaccttacaatgtacaatatctgcttcacatccttgcccatcctggcctacagtctactggaacagcacatcaacattgatgctctgacctcagatccccgattgtatatgaaaatttctggcaatgccatgctacagttgggccccttcttatattggacgtttctggctgcatttgaagggaccgtgttcttctttgggacttattttatttttcagacatcatccctagaagaaaatgcaaaggtatacggaaactggacttttggaaccattgtttttacagtcttagtattcactgtaactctgaagctcgccttggatactcgtttctggacttggataaatcactttgtgatttggggttctttagccttttatgtatttttctcattcttctggggaggaattgtttggccttttctcaaacaacagagaatgtatttcgtatttgctcaaatgctgtcttctgtatccacatggttggccataattcttctaatatttatcagccttttccctgagattctcctgattgtattaaagaatgtaagaagaagaagtgccaggagaaatctgagctgtaaaagggcatctgactcattatccaccagaccttcagtcagacctcttcttttacgaacattctcagacgaatctaatatattgtaacagaatccgaatcttgaactgcctatgttattgtcctacaagcatattgacagtggtttcagctaaaaacgaaagcatgaagaaaactacaaaaagttatcatctcaggatattcgatatgcaacaaactaaaccactctcttatatctaggattcaaaataaatgtccattaaaataccaaatgactctcttaagcatttacagttattgtaagtagccattatggccaaagctctaagttacgaattatatgaaagttgaaagcaagaatacttagaatttctggctttag

SEQ ID NO: 170 - DNA, 1391 bp, Equine
attttcttcccattcaattctgctctgttcttctgccatctcgttactagacgttggcattagacgtgacaatcaactccatttgaactgagcagaagaaatattaaaggcataatcttcagaagaaatgtctcagagacagcctcagtcacctaatgagactttaatttcgatcacaaatgacacagaatcatcaagctctgttgttcctaatgataacacaaaaaaaggacggaccggagacaactctccaggaatagaagcattgtgtgccatctacatcacttatgctgtgatcatttcagtgggcatccttggaaatgctattctcatcaaagtctttttcaagaccaaatccatgcaaacagttcccaatattttcatcaccagcctggcttttggagatcttttacttctgctaacttgtgtgccagtcgatgcaacacactaccttgcagaaggatggctgttcggaagaattggctgtaaggtgctctccttcatccggctcacttctgttggtgtatcagtgttcacgttaacaattctcagcgctgacagatacaaggcagttgtgaagcccctggagcgacagccctccaatgccatcctgaagacctgtgccaaagctggctgcgtctggatcgtgtctatgataattgctctaccagaggctatattttccaatgtttatacttttcaagatcccaacagaaacaggacatttgaagcgtgtgcctcttatcctgtttctgagaggctcctgcaagagatacactctctgctctgcttcttggtgttctaccttattccactctctatcatctctgtctattattccttgattgcgagaacgctttacaaaagcaccttgaacataccgaccgaggaacaaagccatgctcgcaagcagattgaatcccggaagagaattgccaagacggtgttagtgctggtggctctgtttgctctctgctggttgccaaatcacctcctgtacctctaccgttccttcacttatcaaacctacatggatccttccgccgttcattttctcgtcaccattttctctcgggtcctggcattcagcaattcttgtgtaaaccccttcgctctttattggctgagcaaaaccttccagcagcattttaaagctcagttgttctgctgcaaggcagaggtgcccgaccccgctcctgcagatgccactctcaacagcctggctgtgatgggaagggtcccgggggctgctagcacgcaggtgtctgaaattagtgtgacctggttcactgggtgtagtatggagaaggaagatgacagagtctagcttttcaattaaaaagggtctttttcctgccagcgtgtgtatccgactctgagctgcgcgtagg

SEQ ID NO: 171 - DNA, 1373 bp, Equine
gcggcggcacggcgacggcgacgacgctgttcgcgctggcaccatgaacccgctgtaacgcgcagacagcgcggcgcggggggaggggggaggaggaggacgcggccgcgaagttctccgccatgaacctgaggggcctcttccaggacttcaacccgagtaaattcctcatctatgcctgtctgctgctgttctctgtgctgctggcccttcgtctggatggcatcattcagtggagttattgggctgtctttgctccaatatggctctggaagttaatggtcattgttggagcatcagttggaactggagtctgggcacgaaatccccaatatcgagcagaaggagaaacatgtgtggagttcaaagccatgttaattgccgtgggcatccacttgctcctgctgatgtttgaagttctggtctgtgacaggattgagagaggaagccatttctggcttctggtcttcatgccgctgttcttcgtttccccggtgtctgttgcagcttgtgtttggggctttcgacatgacaggtcactggagttagaaatcctgtgttctgtcaacattctccagtttatattcattgccttaagactggacaagatcatccactggccctggcttgtcgtgtgtgtccccctgtggattctcatgtcctttctgtgcctggtggtcctctattacattgtgtggtccgtcctgttcctgcgctccatggatgtgattgcagaacagcgaaggacacacataacaatggcactgagctggatgaccattgttgtgcctctccttacttttgagatcctgctggttcacaaactggatggccacaatgcattctcttgtattccaatatttgtccctctttggctttctttgatcactctgatggcaaccacattcggacagaagggagggaaccactggtggtttggtattcgcaaggatttctgtcagtttctgcttgaaatattcccgtttttgagagaatacggaaatatttcctatgacctccatcatgaagataatgaggaaaccgaagaaactccagttccagaacctccgaaaatcgctcctatgtttcgaaagaagaccagggtagttatcacccagagtcctggaaagtatgtcctcccccctcctaaattaaatattgaaatgccggattagatgccatttcctgggacagaacgtaagtggactgggacacatgctctcttctaccttcctctgcctctttgttcaccccccccccccccgaactggaactggagctgggtctccaggaacttccatctcatgccttgtttgcactcaatgcctaccagtgactcaccacgacgggacacacaggtggcaggtgactgg

SEQ ID NO: 172 - DNA, 585 bp, Equine
atggctgccgaggatgtggcggcgacaggcgccgacccgagcgagctggagggcggcgggttgctacacgagattttcacgtcgccgctcaacctgctgctgctcggcctctgcatctttctgctctacaagatagtgcgcggggaccagcccggcagcggcgacagcgacgacgacgagccgcccccactgccccgccttaagcggcgcgacttcacccctgcggagctgcggcgcttcgacggcgtccaggacccgcgcatactcatggccatcaacggcaaagtgttcgacgtgaccaaaggccgcaagttctacgggcccgaggggccgtacggggtctttgctggaagagatgcatccaggggccttgccacattctgcctggataaagaagcactgaaggacgagtatgatgacctttctgacctcactcctgcccagcaggagaccctgagtgactgggactctcagttcactttcaagtaccatcatgtgggcaaactgctgaaggagggggaggagcccaccgtgtactcagatgaggaagaaccaaaagacgagaatgctcggaaaaatgattaa

SEQ ID NO: 173 - DNA, 2147 bp, Equine
ccaggagaggagccccccactgaaaggagcagagtgtggggcatggtcaggaggatgctggtgcttgtcctgattttgagtctgctccttggttcttctgtgctcttgttctacatcttcgggagctgtggccctcgtccttgtgagacgcgtgtgtgttgggatctcctggctcgttacctggcctctgggaataccagtgtggctccctgtaccgacttcttcagttttgcctgtggacaggccaaagggatcagtaattcttttcaggctcttgcagaggagaacaagaaccgacttcggagaatactggaggccccaggttcctggcacccgggctctggggaagagaaagccttccaattctacagcttctgcatggacacagatgccattgaggctgcaggggctggtcccctcagacaaattattgaggagcttggagggtggcgaatttctggtagttggacttccttggactttaaccgaactctgagacttctgatgagtcagtatgatcacttcccattcttcagagctgatctgcaacctcatcccacccctccacacttgccagtaatccagatataccagccagagtttgaccttcctgtcaagcaagagcaggaacagaagaactatgctcagatcgtgcgggaatacctgacttacctgaatcagctgggaaccttgctgggaggagacgcaagaaaggtgcaagaacatgctgccatgtccatctccattacctcgcagctgcttcaattcctgagacccccggaacagcgacgggcacagggaaagctcttccagatggtcactattgatcaactgcaggaaatggcccctgccattgactggttgtcctgcttgcaagcgatattcacatcgatgtccctgagcccctcccagccccttgtggtccatgacctggagtatttgaaaaacatgtcatacctggtggaagaacagctgtcaaagcacagggactttctgcagagccacatgatcttggggctggtggggtccctttctccagtcttggacagtaaattccaggaggcgcatactttgctgaaccagaaactacgggagctgacagaacgaccacccttgcccacccaccctcgatggatgaagtgcgtgaaggagacaggagactacttccagcctaccctggcagccttgtttgttcgtgaggccttcagcccgagcacccaaagtgctgccatggaattattcactgagatcaaggatgccctcatcactcgtctcagaagtcttccctggatggatgagaggacccagaaagaggcccaggacaaggtcacgcaacttcaagtaaagatgggggccccagaatgggccctggagccagcactggccagacaggaatacaacgatatacaacttggatccagctacctgcagtcccacctgagctgtgtccgatccctccgagctagaattatccagagcttcttacagccttctcctcaccacaggtggcaggtgcttccctgggaggtcaatgcttactactcaatatctgaccatgttgtggtcttccctgccggactcttccaacccccgttctttcaccctggctaccccagagctgtgaactttggcgctgctggcagcattatggcccatgagctgttgcatgtcttctacaagctcttactccctggaggctgcccagcctgtgacacccgtgccctacagggggcattgctgtgcctggagcacctctatgctgcctttccattacccagaggagtttccttcaatggctcccgcacactcctggagaatgctgcagacacaggggggctagttattgcactaaaggcatatagaaagaggctattatggcaccgcggggagactgtcctacccaacctgaacctcagcccccagcaactcttcttccgaagctatgcccaggtgatgtgtggggatcccagcacccaggattctcaggacactcacagccctcccacccttcgaatccacgggcccctcagcaacatcccagactttgccagatatttccgctgtccacgtggtgccctcatgaacccttccagccactgcccactctggtaacctggctaccaaagagacctcaatacagatctaac

SEQ ID NO: 174 - DNA, 1543 bp, Equine
cggagtcccagtgtggcctggaggaacggatctcgtgccagggcgacccagtcgggagcccccagaccgagctcgtgttgtggggagactcccacttctcccgagggacgccgatcccgggacggtcgaggcgttggggcggctaccgaattctcagcggggagaccccgttgggcagagggcgcgcagtctcgaacagtctcggggagccgagcggaatcaggcgggatcacccgggggcgcagagcccccgtcgtgccttgtgcggcacagaggccaggggagagagccctcggaggccgaagcccatgcccgggttgggggcggctgtccagtgagtcctcctggcccgccggacggagaagagcgacaccgaagccggcgggaggggagcacttcaaggccggcggctgcggaggatgggcgcctgagcggttcggagcgcagcgcagcacgggcaggcgaagcgtgctttgctgaggaggcaccaggggatcctgaagtgcagcctgcccccgggaagatggctcggcctgggcagcgttggctcggcaagtggcttgtggcgatggtcgtgttggcactgtgccggctcgccacgccactggccaagaacctggagcccgtgtcttggagctccctcaaccccaactttctggtgggaaagggcctggtgatctacccaaagattggagacaagctggacatcatctgtccccgagcagaagcagggcggccctacgagtactacaagctatacctggtgcggcctgagcaggcagctgcctgcagcactgtgctcgaccccaacgtgctggtcacctgcaataggccagagcaggaaatccgctttaccatcaagttccaggagttcagccccaactacatgggcctggagttcaagaagcaccatgattactacattacctgtgagttcctggctgacctgcctggtctgttggcagaaccctttgggatcggccagctgttcagcctttctcttcacaggaaattttttcctgaccccaaatccaggattccttctccgtgcacttctagtcttgcccctggccagtccgggggctccctgggggtattagggtggtctcccagagggcagaagccattcctcggctgccctttcaggccctataccgtgaaccaagaagagaaaagcggcagtggggaccctgacagcttcttcaactccaaggtggcattgttcgcggccgttggtgctggctgtgtcatcttcctgctcatcatcatcttcctgacggttctgctactcaagctgcgcaagcggcaccgcaagcacacgcagcaacgggcacctgccctctcgctcagtaccctggccagtcccaaggggggcagtggcacggcgggcaccgagcccagtgacatcatcatccccttacggactacagagaacaactactgcccccactatgagaaggtgagtggggactacgggcaccccgtctacatcgtccaggagatgccaccccagagcccagcgaacatctactacaaggtctga

SEQ ID NO: 175 - DNA, 1884 bp, Equine
aggtgtattccttattccctacgtcctgatcgccctgattggaggaatccccattttcttcttggagatctcgctgggccagttcatgaaggccggcagcatcaatgtctggaacatctgccccctgttcaaaggcctgggctacgcctccatggtgatcgtcttctactgcaacacctactacatcatggtgctggcctggggcttctattacctggtgaagtccttcaccaccacgctgccctgggccacgtgtggccatacctggaacactcccgactgtgtggagatcttccgccacgaagactgtgccaatgccagcctggccaacctcacatgtgaccagcttgctgaccgccggtccccagtcattgagttctgggagaacaaagtcttgcggctttctggggggttggaggtaccaggggccctcaactgggaggtgaccctgtgtctgctggcctgctgggtgctggtgtacttctgtgtctggaagggggtcaagtcaacaggaaagatcgtgtacttcaccgctacattcccctacgtggtcctcgttgtgctgctggtgcgtggagtgctgctgcctggcgccttggacggcatcatctactatctcaagcctgactggtcgaagctggggtctcctcaggtatggatagatgccgggacccagattttcttctcttacgccattggcctgggagccctcacagccctgggcagctacaatcgcttcaacaacaactgctacaaggacgccatcatcctcgcgctcatcaacagcgggaccagcttctttgctggctttgtggtcttctccatcctgggcttcatggctgcagagcagggcgtgcacatctccaaggtcgcggaatcagggcctggcctggccttcatcgcctacccccgggccgtcacgctgatgcctgtggccccactctgggctgccctgttcttcttcatgctgctgctgcttggtctcgacagccagtttgtaggtgtggaaggcttcatcaccggcctgctcgacctcctcccggcctcctactacttccgtttccaaagggagatctctgtggccctatgctgtgccctctgctttgtcatcgacctctccatggtgaccgatggcgggatgtacgtcttccagttgtttgactactactcagccagcggcacgaccctgctctggcaggccttctgggagtgcgtggtggttgcctgggtgtatggagccgaccgcttcatggatgacgttgcctgcatgattgggtaccgaccttgcccctggatgaaatggtgctggtctttcttcaccccgctggtctgcatgggcatcttcatcttcaacgtggtgtactacaagccgttggtctacaacaatacctacgtgtacccgtggtggggcgaggccatgggctgggccttcgcactctcctccatgctgtgtgtgcccctacacctcctgggctgcctcctcagggccaaggggaccgtggctgagcgctggcaacacctgacgcagcctgtctggggcctccaccacttggagtacagagctcaggactcggatgtcaggggcctgaccaccctgaccccagtgtccgagagcagcaaggtggtggtggtggagagcgtcatgtgacaggcaccccagctcacatcaccagctcaccctcttgtagccatagcagcccctgctttagcccccccccgacccattcagggggcttgcctttccctgacacttttggggtctgccggggtgggggggagaagcaccatgagtgcttataactaaaataacttttttccatttttaataaaacaccaaaaatatcacaacccaccaaaaatagatgcctccccccttaaccaagc

SEQ ID NO: 176 - DNA, 2127 bp, Equine
gccgccgccgcggtggagatgaaattccgggctatgaagcgtggcgtccgtgttcctgttcgtggcgagacgacgacggcgctgtacctgagcagcacgtaccgctcggccggggatggcatgtggcaagcgctgacgctgctgttctcgctgctgccctgcgcgctcgtgcagctcacgctcctcttcgtgcaccgcgacttcagccgcgaccgcccgctcgtgctgctgctgcacctgctgcaactcgggcccctcttcaggtgttttgaagttttctgcatctattgtcagtcaaaccacgttgaagagccttatgtcagcatcatcaagaagcgacagatgccaagaaatggcctctcagaggagattgagagggaagtgggccaagcagagggcaagctgttcacccaccgatctgcattcagccgggcatcggtgatccaggctttcctcggctcagccccccagctgaccctgcagctctatataagcaccttgcaacggaaagtcactatcacaagatgtttctttatggtcctgtctctgttatccattgtgtatggagccttgcgctgcaacatcctagccatcaagatcaagtacgatgaataccttgtaaaagtcaagcctctggcctatgtttgtatcttcctctggaggagctttgagattgccactcgagttgtggtcctggtcctctttacttccgtcctgaaggcctgggtggtgatgatcatactcatcaacttcctcagcttcttcttctatccctggatcctcttctggtgtagtggctccccgttccctgagaacatcgagaaggccctcagtcgcgtgggcaccaccatcgtgctgtgcttcctcaccttcctctatgctggtatcaacatgttctgctggtcagctgtgcagctgaaaatcaacaaccctgacctcatcagcaagtcccagaactggtaccagctactggtgtactacatgctgagattcgttgagaacgccttcctcctcctcatgtggtatctttacaagaccgacatctatatgtatgtgtgtgcacctctgttgattctgcagttgctcattgggtactgcacagccattctgttcatgctcgtgttctatcagttcttccatccttgcaaaaagctcttttccaccagtgtttctgaaggccttcaggagtggctaaggtgtgtttgctgtgactgcaggcggcagaaatcctgtgagtctgtaggaaaggcagatcttaggtcacctgcggacatagatgagacaccttctagcagtaaaataagttctatgcccagcgagatcttgaatcccaatgagttctgctctatttaataggacctgagtctcttggggcacagatatatgtattctgggttgatccctgttcctcacacaagtgatgagccctgcgcagttaacagagcaggaagttagctctcaactctttgtgagttgctcccctttagagagcttttgggcatatgggaactatggggagaagccagggaaacccctgagtgttgaaggggcagcctaaggcaccaccatgcacagttgaccatgttctcccgggtgttactggccttttcactgaaaaagcatcgatgatatctgagttgggctggttacatccatcaggtaaaatgaggacagtggttttcttcttttctagttttctggattgctggtctgggtagcctaatgttttattatccctgagcatagtttcacccaagaactgtcctgatcaccaaagaaggttcctggggtttcaccatcagcaacatcattcctgtcagagttttccgagagggctgttcatgtttggtttttaaatacagagatattccattttcatctcattagggctctttgtacataaccaactgtagccaccttggcctgctatctctaattggttcaaaagtctagatttgggactattccccaggacccatggatgtaaaactgaattctaaatttggttgtggaagccctagcattttaggaaagttgtgttccttcaatatgttgaagaaattctgcatcaagaaggttgttaaaacattaaaattatatagacttttgtaagcagaattcttctca

SEQ ID NO: 177 - DNA, 791 bp, Equine
ggttcaaactcttctccgtgagggtggaggcgatcgagaggtcacgtgatgagcatcctgctgcccaacatggcggagttcgacaccatctcggaactggaggaggaggaggaagaagcggcaacgtcgtcgtcgtcgccgtcgtcgtcttctgtatcggggcccgacgacgatgacgaggaagatgaggaggaggaggaggaagaagaggaggaggaggaagaagaagaggaggaggagacgccgcccccgcctcgggtagtgagcgaggagcatctgcggagatatgcccccgaccccgtattggtgcggggcgccggccacatcactgtgtttggcttgagcaacaagtttgatactgaatttccctcagttctaacagggaaggtggccccagaagaatttaagaccagcattggccgtgtgaatgcatgtttgaaaaaggctctcccagtcaatgtgaaatggttgctgtgtggttgtctctgctgctgttgcacactgggttgcagcctgtggcctgttgtttgtctcaacaaaagaaccagaagatcaattcagaagttattagaatgggaaaataacagattatatcacaagcttgctttgcactggaagttgactaaaaggaaatgcgaaactagcaatatgatggagtatgtaatactaatagagttcttaccaaaatatcccatattccgacctgactgaggaattttattcggtcacttctgtgttacctgtcatttcctacccttagtgccttgtagatgattttggaatgaagatgg

SEQ ID NO: 178 - DNA, 4621 bp, Equine
aggaatgtaaagaaagcaaaatggatccaagtgtggatgtgaattctgtcaccatctctgttgaggggatgacgtgtagttcctgtgtttggacgattgagcagcagattggaaaactgagtggtgtccatcacattaaagtttcactggaagaaaaatgtgcaactattatttatgaccctaaactacagactccaaagaccctacaggaagctattgatgatatgggctttgatgccattctcaaccatcctaaccctctgcctgttttaactgacaccgtgtttctcactgttactgcttcactgtctccaccatgggaccatatccaaagtacattgctcaagaccaagggtgtgacagacattaaaatttcccctcagcaaagaactgcagtggtgacaataatcccttctgtagtgactgccaatcagataatagagctggttccagatctcagtttagatattggaactctggagaaaaagtcaggaacttgtgaagattacagtatggctcaagcaggtgaagtcatggtgaagatgaaagtggaagggatgacctgccattcctgcactagcacgattgaaggaaaaattgggaaactgcaaggtgttcagcgaattaaagtctccctggacaaccaagaagctactattgtttatcaacctcatcttatcacagtcgaggaaatcaaaaagcagatcgaagctgcgggctttccagcattcatcaaaaaacagcccaagttcctcaaattgggagctattgatatagaacgtctcaagaacacaccagtcaaatcctcagaaagaccacagcaaaggagtccatcatgtaccaatgattcagcagtcactttcatcgtagatggcatgcattgtaaatcatgtgtgtcaaatattgaaagtgctttatctacactccaatatgtaagcagcgtagtagtttctttagagaataggtctgccatagtaaagtacaatgcaagcttagtcactccagaaaccctgagaaaagcaatagaggctatatcaccggggcaatatagagtcagctttccaagtgaagttgagagtacctcaaactctccctccggctcctctcttcacaagattcctttgaacatagttagccagcctctcactcaagaaaccgtgataaacattgatggcatgacttgtaattcttgtgtgcagtctattgagggtgtcatatcaaaaaaggcaggtgtgaaatccatacgagtatcccttgcaaatggcaatgggactgttgaatatgatcctctactaacctctccagaaactttgagaaaagcaatagaagacatgggatttgatgctactttgtcagatacaaatgagccgttggtagtaatagctcagccctcttcagaagtgccacttttgacctcaactaatgaattttgtcctaaaacgatgacaccaacgcacgacaaggaggaggcaaagacttcatctaagtgttacatacaggtcactggtatgacttgtgcttcctgtgtagcaaacattgagcggaatttaagacgagaagaaggaatatattctgtacttgtggctctgatggctggcaaggcagaagtaagatataatcctgctgtcatacaacccccaattatagctgagttcatccgagaacttgggtttggagccactgtaatagaaaatgctgatggcggagatggcattttggaacttgttgtgagaggaatgacatgtgcctcctgtgtacataaaatagagtctaccctcacaaaacacagagggatcttctactgctctgtggccctggcaaccaacaaagcacatattaaatacgatccagaaattattggtcccagagatattatccatacaattgaaagcttaggttttaaagcttctttggtcaagaaggatcggtcagcaagccacctagaccataaacgagaaataagacaatggagacggtccttccttgtgagcctatttttctgtattcctgtaatggggctgatgatatatatgatggttatggaccaccaccttgaaactcttcaccataatcagaacataagtcaagaagaaatgatccacattcattcttctatgttcctggagcgccagatcctgccaggattgtccattatgaatttgctatcctttttattgtgtgtacctccaaaggaatttttcggaggctggcacttctacattcaggcctacaaagcactgaagcataaaactgcgaatatggacgtgctgattgtgctggccaccaccattgcatttgcctactctttggttattcttctggttgcaatgtatgagagagccaaagtgaaccctattactttctttgacacgcctcctatgctttttgtgtttattgcactaggccggtggctggaacatatagcaaagggcaaaacctcagaggctcttgccaagctaatttcactacaagctacagaagcaactattgtaactcttgactctgataatatcctcttgagtgaagaacaagtggatgtggaacttgtacaacgtggagacatcattaaagtggttccaggaggcaaatttccagtggatggtcgtgttattgaaggacattctatggtagatgagtctctcatcacaggggaggcaatgcctgtggccaagaaacctggcagcacagtaattgctggttccattaaccagaatgggtcactacttatccgtgcaacccacgttggaggagacacaaccctttctcaaattgtcaaacttgtggaggaggcgcaaacatccaaggctcctatccagcagtttgcagacaaactcagtggctactttgttccttttattgttattgtttccattgctaccctcttggtttggattataattggatttctgaattttgaaattgtggaagcctactttcctggctacaacagaagtatctcccgaacagaaacaatagtacgctttgctttccaagcctctatcacggttctgtgcattgcatgcccttgttcactgggactggccactccaactgctgtgatggtgggtacaggagtaggtgctcaaaatggcatcctaatcaaaggtggagagccactggagatggctcataaggtaaaggtagtggtatttgataagactggaaccattacccatggaaccccagtagtgaatcaagtaaaggttctagtggaaagtaacagaatgtcacgcaataagatcctggctattgtgggaactgctgaaagtaacagcgaacaccctctaggagcagccataacgaaatactgcaagaaggagctgaacactgaaaccttgggtacctgcacagatttccaggttgtgccaggctgtggtattagctgcaaagtcaccaatattgaaggattcctgcataagaataactggaagatagaggaaaataatattaaaaatgcatccctggttcaaattgatgcaagtaatgaacagccatccacttcatcttccataattattgatgcccagctctcaaattctcttaattctcagcagtacaaagtcctcattggtaaccgggagtggatgattagaaatggtcttgtcattaacaacgatgtagatgattctatgaatgaacatgagagaaaaggtcgtactgctgtattggtggcagttgacgacgagctgtgtggcttgatagctattgctgatacagtgaagcctgaagcagaattggctgtccatactctgaaatcgatgggcttagaagtagttctgatgactggagacaacagtaaaacagctcggtctattgcttctcaggttggcattactaaggtgtttgctgaagttctaccttcccacaaggttgctaaggtgaagcaacttcaagaggaggggaaacaggtagcaatggtaggagatggaatcaatgactccccagctctggcgatggctaatgttggaattgccattggcacaggcacagatgtagccattgaagcagccgatgtggttttgataaggaatgatcttctggatgtagtggcaagtattgacttatcaaggaagacagtcaagaggattcggataaattttgtcttcgctctaatttataatctggttggaattcccatagctgctggagtttttatgcccattggtttggttttgcagccctggatgggatctgctgcaatggctgcctcgtctgtttcagtagtactttcttccctcttcctgaaactttataggaaaccaacttatgagaattacgaactgcatgcccgaagccagatgggacagaaaagtccttcagaaatcagcgttcatgttggaatagatgacacctcaagaaattctcctaaactgggtttgctggaccggattgttaattacagcagagcctccataaactcactactgtctgataaacggtccctaaacagcatcggtaccagtgaacctgacaagcactcactcctggtgggagactgcagggaagatgacgacactgcgttgtaacaggccacaaagagtgctactagctgatgttattatgcactgacacagcattcataatgtcaccttagcttttcagaatattgcaagaggatgtt

SEQ ID NO: 179 - DNA, 1146 bp, Equine
atggtgttcgcgttttggaaggtctttctgatcctaaactgccttgcaggtcaagttactgcggtgcaagtgaccatcccagacagtttcgtgaacgtgactgttggatctgatgtcactctcatctgcacctataccaccactgtggcctctcgggacaagctttccatccagtggtcattcttccacaagaaggagttacagccagtttccatttactattctgaaggtggacaagctgcagccattgggcaatttaaaggtcgaattgtagggtccaacgaaccaggcaacgcatctatcactatttcgcatatgcaaccagcagatagtggcatctacatctgtgatgttaacaacccccctgactttgtcggcacaaatcaaggcatcctcaacgtcagcgtgttagtcaaaccttctaagcccttttgcagcatccagggaataccagaaactggccatcctatatctctttcttgtctctccgtgcttggaacaccttcccctgtgtactactggtatagacttgaaggaagagacatcgtcccagtgaaagaaagcttcaacccagccactggaattttagtcattggaaatctgaccaattttgaacaaggttattaccagtgcactgctatcaacatccttggcaatagttcctgtgaaattgatctaacttcttcacatccagaagttggaatcattgttggggccttggtgggtacccttgtaggtgctgccattatcacctctattgtgtgcttcgcaaggagcaaggcaaaggcaaagggaaaggggaaggagaggaagagaaattctaaaaccaacccagaacttgaaccaatgagaatgataaaccaaagcacagagtgtgaaacaatgccaaatgaagatgctgtccaactagaagcgactctgccagtttccacccatgagactgaccctgataccatcctggggctggatcatgagcctatccctgagcctgagcctgtcccagagcctgtcccggagcctaccgcaggacctgagcttgtccctgtgcctgagattgagatccatctggagccagagccggagccggagccagagacggagccggagcccgggattgtagttgaacccttttgtgacgaggaaaag

SEQ ID NO: 180 - DNA, 1146 bp, Equine
agcccgagcgcgtcaccccctcgcgctgcggtggtcgcgttccgctggcccgttcggtgtcggcctacgctgctgcgacgccgcggaacaatggctgtgctcgtcgtgctcctctccctgctggtggcgggtgttttgggaaatgagtttagtatattaaaatcaccagggtctgttgttttccgagatggaaattggcctataccaggagagcgaatcccagacgtggctgcactgtccatgggcttctctgtgaaagaagacctttcttggcctggacttgcggtgggtaacctcttccatcgtcctcgggctaccgttatggtgatggtgaagggagtggacaaactcgctctacccccaggcagtgtcatttcgtaccctttggagaatgcagttccttttagccttgacagcgttgcaaattccattcactccttattttctgaagaaactcctgtagttttgcagttggctcctagtgaggaacgagtgtatatggtggggaaggcaaactcagtttttgaagacctttcagtaaccttacgacagcttcgcaatcgcctgtttcaagaaaattccattctcaattcacttcccctcaattctctgagtaggaacaatgaagttgacctgctctttctttctgaactgcaagtgctacatgatatttcaagtttgttgtctcgacataagcatctagccaaggatcattctcctgatttgtattcactggagctggcaggtttggatgaaattggaaaacattacggggaagactctgaacaattcagagatgcttctaagatccttgttgatgctctgcaaaagtttgcagatgacatgtacaatctttacggtgggaatgcagtggtagagttagtgactatcaaatcattcgacacgtctgttgtgaggaagacaaggactatccttgaggcagaacaggcgaagagcccatcaagtccctataaccttgcatataagtataatttagagtatccagtggttttcaacatggtactttggataatgatcgccttggccttggctgtgattatcacctcttacaatatttggaacatggatcctggatatgatagcatcatttataggatgacaaaccagaagattcgaatggattga

SEQ ID NO: 181 - DNA, 3762 bp, Equine
acaggcaggatgggcgacatggccaacagttccattgagttccaccccaagccccagcagcaacgggaagcgccccatgcaggcggctttgggtgcacactggctgagctgcgctccctcatggagctccgaggggccgaggcgctgcagaaggtccaggaagcctatggggatgtcagcgggctctgcaggaggctgaagacctcgcccacagagggtctggccgacaatgccagtgacttggagaagcgcaggcagatctacgggcagaacttcatccctcccaagcagcccaagaccttcctgcagctggtgtgggaggccctgcaggacgtgaccctcatcatcctagaggtggctgccatcgtctccctgggcctctcgttctatgcgccacccggagaggagagtgaggcgtgcgggaatgtgtcagccggggcagaagatgaaggcgaggctgaggccggttggatcgagggggccgccatcctgctgtctgtagtctgcgtggtgctggtcacagctttcaatgactggagcaaggagaagcagttccggggcctgcagagccgcatcgagcaggagcagaagttcacagtcatccgcaatgggcagctcctccaggtccctgtggccgcactggtggtgggcgacatcgcccaggtcaagtatggagacctgctgcctgccgacggcgtgctcatccagggcaacgacctcaagatcgatgagagctccctgactggcgagtcggaccacgtgcgcaagtcagccgacaaagaccccatgctgctctcaggtactcacgtcatggaaggttccggaagaatggtggtgacggccgtcggtgtgaactcccagacaggcatcatcttcaccttgctcggagcaggcggagaggaggaggagaagaaggataagaagggtaagggaaagcaatgcaagcagcaggatggggcgatggagagtagccagaccaaagctaagaagcaggatggggcggttgccatggaaatgcagcctctgaagagcgcggagggcggggagatggaagagcgggagaagaagaaagccaccgtgcccaagaaggagaaatccgtccttcagggcaagctcaccaaactggctgtgcagatcgggaaagcagggctggtgatgtctgccatcaccgtcatcatcctggtcctctactttgtgattgagaccttcgtcgtcgacggccgggtgtggcttgcggagtgcacgccagtctatgtgcagtacttcgtgaagttcttcatcatcggtgtcactgtgctggtcgtggctgtcccggagggcctccctcttgctgtcaccatctccttagcttactctgtcaagaaaatgatgagggacaacaacctggtccgccacctggacgcctgcgagaccatgggcaatgccacggccatctgctcggacaagacgggcacactcaccaccaaccgtatgaccgtggtccagtcctacctcggggacactcactacaaggagattccagcccccagcgccctgacacccaagatcctcgacctcctggtccacgccatctccatcaacagtgcctacaccaccaaaatactacctccagagaaggaaggggctctcccacgccaagtgggcaacaagacggagtgtgccctgctgggcttcgtcctggacctgaagcgggacttccagcctgtgcgagagcagattccggaagataagctttacaaagtgtacaccttcaactcagtccgcaagtccatgagcacagtcatccgcacgcccgacggcggcttccgcctcttcagcaagggcgcctcggagatcctgctgaaaaagtgcaccaacatcttaaacagcaacggagaactgcgcagcttccgccctcgggaccgggacgacatggtgaagaagatcattgagccgatggcttgcgacggcctccgcaccatctgcatcgcctaccgcgacttctctgctgcccaggagcctgactgggacaatgagaatgaggtggtgggcgacctcacctgcatagctgtcgtgggcatcgaggaccctgtgcgacccgaggtccctgaagctatccgcaaatgccaacgtgctggcattacagtccgcatggtgactggagacaacatcaacacggcccgggccatcgcagccaagtgtggcatcatccagccaggggaggacttcctgtgcctggagggaaaagaattcaaccggcgcatccgcaatgagaaaggcgagatagaacaggagcgtctggacaaggtgtggcccaagctgagggtcctcgcccgatcatctcccactgacaagcacactctggtcaaagggattattgacagcacgactggcgagcagcgacaggtggtggccgtgacgggggatggcactaacgacgggccagccctcaagaaagcagatgtgggcttcgccatgggcatcgcagggactgacgtggccaaggaggcctcggacatcatcctgaccgatgacaacttcaccagcatcgtcaaggcggtcatgtggggccgcaacgtgtacgacagcatctcaaagttcctgcagttccagctgacagtcaacgtggtggccgtgattgtggccttcacgggcgcctgcattactcaggactctcctctcaaagccgtgcagatgttgtgggtgaacttgatcatggacacatttgcctctctggccctggcgacggagccccccaccgaatcgctgctgctgcggaagccatacggccgagacaagcccctgatctcccgcaccatgatgaagaacatactaggccacgcggtgtaccagctcaccatcatcttcacgctgctctttgtgggggagctcttcttcgacattgacagtgggaggaacgcgcccctgcactcgccgccctcggagcactacaccatcatcttcaacaccttcgtcatgatgcagctcttcaacgaggtcaacgcccgcaagatccacggcgagcgcaacgtgttccacggcatcttcagcaaccccatcttctgcgccatcgtcctgggcacctttgcaattcagattgtcatcgtccagtttggcgggaagcccttcagctgctcccccctgtccacggagcagtggctctggtgcctgtttgttggcgttggggagctggtctggggacaggtcattgccaccatccccaccagccagctcaagtgcctgaaggaagcagggcatgggcccgggaaggatgagatggctgacgaggagctggccgagggagaggaagagattgaccatgctgagcgcgagctccgccgaggccagatcctctggttccggggcctcaaccggatccagacacagatggaggtagtgagtaccttcaagagaagcggttcatttcagggtgctgtgcgccggcggtcttcggtcctcagccagctccatgacatccgggtggtgaaagcattccgtagctcactctatgaaggcctggagaaaccggaatccaagacctccatccataacttcatggcaacgcccgagtttctgatcaatgactacacccacaacatcccgctcatcgatgacacggacgtggacgagaacgaggaccgtctgcgggcccccccacctccgtcccccaaccagaacaacaacgccatagacagcggcatctacctgaccacgcacggcaccaagtcagctacctcgtcagtacccgggagcccgctccacagcgtggagacgtccctctaa

SEQ ID NO: 182 - DNA, 1193 bp, Equine
ccaaccacaagcactaaagcagaggggcaggcagcacgcagcctggcagccagcgcaccagcccagccatggtccttgaggtaagtgaacatcaagtgttccaagactctgagcttgccttcctcctggaaaactgcagctcttcctatgactacctaggagaaaatgagagtgacacctgctgcgcgtccccaccctgcccacaggacttcagcctgaactttgacagggccttcctgccggccctctacggcctcctctttgtgctggggctgctgggcaacggcgctgtggcggccgtgctgctgagccagcgggccgccctgagcagcaccgacactttcctgctccacctggccgtggctgacgcactgctggtgctgaccctcccgctctgggcagtggatgctgctgtccagtgggtcttcggctctggcctctgcaaagtggcaggtgccctcttcaacatcaacttctatgcaggggccctcctactggcctgcatcagctttgatcggtacctgagcatagtgcatgccacccaactctaccgccgggggcccccgacccgcgtggccctcacttgtgtagttgtctgggggctctgtctgctctttgccctcccagacttcatcttcctgtcagcccaccgtgacgagcgcctcaatgccacccactgccagtacaacttcccgcaggtgggtcgcacagctctgcgcgtactgcagctggttgctggtttcctgctgcccttgctggtcatggcctactgctatgcccgcatcctggctgtgctgctggtctccagaggccagcggcggctgcgagccatgcgcctagtggtggtggtagttgtggcctttgccctctgctggaccccctactacctggtgatgctggtggacaccctcatggacctgggggccttggcccgcaactgtggcagagaaagtcatgtggatgtggccaagtctgtcacctcaggtctagggtatatgcactgctgcctcaacccgctgctctacgcctttgtgggtgtcaagttccgagagcgtatgtggatgctacttatgcgcctgggctgccctgaccagaaagggcatcaacggcagccaccatcttgccgccgggattcatcctggtctgagaccacagaggcctcctactcaggcttgtgaggctgggatgggggc

SEQ ID NO: 183 - protein, 359 aa, Equine
MATTLDGTETVGEAEGTTPYDYDGSLPCEKINIKMLAAQFLPPLYSLVVVIGLLGNLMVVVILTKYKRLRIMTNIFLFNLAISDLLFLFTLPFWIHYVWRDEWVFGHHMCKFLIGLCYTGLYSEIFFIILLTLDRYLAIVHAVFALRTRTVTFGIITSVFTWGLAGLAALPEFIFHGFQEEFGQYVCLPFYPEAAENIWKSTHVLRMNILSLALPLLIMAVCYSGIIKTLLRCPNKKKYKAIRLIFVIMVVFFVFWAPYNLVLFFSTFQTTFLGTSCDQSKQLDMALLVTEMIAYTHCCVNPVIYAFVGERFQKNLHHFFHTYVAIYLCKYIPFLPSEKLERASSVSPSTGEQELSAAF

SEQ ID NO: 184 - protein, 1231 aa, Equine
EGHHVMEPPVITEQSPRRLVVFPTDDISLKCEASGKPEVEFRWTHDGVHFKPKEELGVTVHQEPHSGSFTITGNNSNFAQRFQGTYRCFASNKLGTAMSHEIQLMAEGAPKWPKETVKPVEVEEGESVILPCHPPPSAEPLRIYWMNSKILHIKQDERVTMGQNGNLYFANVLTSDNHSDYICNAHFPGTRTIIQKEPIDLRVKATNSMISRKPRLLFPTNSSSHLVALQGQPLILECIAEGFPTPTIKWLRPSGPMPSDRVTYQNHNKTLQLLNVGEEDDGEYRCLAENSLGSDRHAYYVTVEAAPYWLQKPQSHLYGPGETVRLDCQVQGRPQPEVTWRINGIPVEELAKDQKYRIQRGALILSNIQPSDTMVTQCEARNRHGVLLANAYIYVVQLPAKILTPDNETYMAVEGSTAYLLCKAFGAPVPSVQWLDKEGKTVLQDERFFPYTDGTLGIRDLQANDTGHYFCQAANDQNNVTIVANLQVKDATQITQGPRSAIEKKGSRVTFTCQASFDPSLEHSITWRGDGHNLQELGDSDKYIIEDGRLVIHSLDYSDQGNYSCVAGTKLDVVESRAELLVVGDPGPVPQLELSDHHLLKQSQVRLSWSPADDHNAPIEKYDIEFEDKEMAPEKWYSLGKVPGNQTSTTLKLSPYVHYTFRVTAINKYGPGEPSPASETVVTPEAAPEKNPVDVKGEGNETNNMVVTWKPLKWMDWNAPQVQYRVQWRPQGTRGTWQEQIVSDPFLVVSNTSTFVPYEIKVQAVNSQGKGPEPPITIGYSGEDYPQASPELEGIKILNSSTVLVRWWPVDPALVKGHLRGYNVTYWWEGSQRKHSKRHVHKGHMVVPANATSAILGGLRPYSFYHLEVQAFNGRGLGPASEMTFHTPEGVPGHPEALHLECQSNTSLLLHWQPPLSHNGVLTGYVLSYHPLDNGGKEQLSFDLPDPELRSHNLSNLSPQLRYRFQLQATTKEGPGEAIVREGGTMALAGNRSFGNISAMAGENYSVVSWVPREGRCNFGFQIWFKALGDEKMGARLTPQSVSYNQSSYTQWDLQPDTHYEIHLLKETVLLHQMAVKTNGTSHVRLPPAGFTTEGWFIGFVSAAVLLLLVLLILCFIKRSKGGKYSVKDKEDTQVDSEARPMKDETFGEYRSLESDNEEKAFGSSQPSLNGDIKPLGSDDSLADYGGSVDVQFNEDGSFIGQYSGKKEKEATGGNDSSGAASPINPAGTLE

SEQ ID NO: 185 - protein, 356 aa, Equine
MPTHFPEPISDDFQYDESAEACNMEDIVVFGTAFLSVVYSLVFVFGLVGNLLVIFSLSNSRKRKSITDIYLLNLALSDLLFVATLPFWTHYLRSEQGFHNAVCKLTTAFFFIGFFGGIFFITIISIDRYLAIVLAANSMNNRTVTHGVTISLGVWAAAILVAAPQFMFTKQKENECLGDYPEVLQDIWPVLRNVEANALGFLLPLLILIYCYFRIMRTLFSCKNRKKAKAIKLILLVVIVFFLFWTPYNIMIFLETLNLYDFFPDCDMKRDLKLAIGVTETIAFIHCCLNPIIYAFAGEKFRRYLSHLYRKCLAVLCCYSVDTGFSPPESQTGRRESILSSNFTHYTSDGEVSLHV

SEQ ID NO: 186 - protein, 193 aa, Equine
VGWILSTICMGFAEWRVWYMNNTSLLPSGLARVGMWKICIYYHADNFYRATSCYHYTYCDTFLPLDIRIAQNLLLIASILGLLGKASITFALRNVYMGILRKNATCNAFVASGILNIAAGVCISVAVTWNYHSVMNEEEIAFPPYFYVPFKPDAQEIGNAIIVACLAAFLMLLSGLCFLSYKFPLDSHVCPEI

SEQ ID NO: 187 - protein, 1135 aa, Equine
MLVGRWSHLYPRTCQCAGEEKRVGTRTVFVGHHPVSETETYVAQKFCDNRIVSSKYTLWNFLPKNLFEQFRRIANFYFLIIFLVQVTVDTPTSPVTSGLPLFFVITVTAIKQGYEDWLRHRADNEVNKRTVYIIENAKRVRKESEKIKVGDVVEVQADETFPCDLILLSSCTSDGTCYVTTASLDGESNCKTHYAVRDTIALCTAESIDTLRAAIECEQPQPDLYKFVGRINIRNNNLEAVARSLGPENLLLKGATLKNTKKIYGVAVYTGMETKMALNYQGKSQKRSAVEKSINAFLIVYLFILLTKAAVCTTLKYIWQSIPYNDEPWYNQKTQKERETFKVLKMFTDFLSFMVLFNFIIPVSMYVTVEMQKFLGSFFISWDKDFYDEEINEGALVNTSDLNEELGQVDYVFTDKTGTLTENSMEFVECCIDGHKYKGVTQEADGLSQTDGPLTYFDKADKNREELFLRALSLCHTVEIKTNDAVDGAPESSELAYMSSSPDEIALVKGAKKYGFTFVGIHNGHMRVENQRKEIEEYELLHTLNFDPVRRRMSVIVKTQAGDILLFCKGADSAVFPRVQNHEIELTKAHVERNAVDGYRTLCVAFKEIAPDDYERIDRQLIEAKMALQDREEKMEKVFDDIETNMNLIGATAVEDKLQDQAAETIEALHAAGLKVWVLTGDKMETAKSTCYACRLFQTNTELLELTTKTIEECERKEDRLHELLIEYCKKLRHEFPKGSRNLKKAWTEHQEYGLIIDGSTLSLILNSSQDSSSNNYKSVFLQICMKSTAVLCSRMAPLQKAQIVRMVKNLKGSPITLSIGDGANDVSMILESHVGIGIKGKEGRQAARNSDYSVPKFKHLKKLLLAHGHLYYVRIAHLVQYFFYKNLCFILPQFLYQFFCGFSQQPLYDAAYLTMYNICFTSLPILAYSLLEQHINIDALTSDPRLYMKISGNAMLQLGPFLYWTFLAAFEGTVFFFGTYFIFQTSSLEENAKVYGNWTFGTIVFTVLVFTVTLKLALDTRFWTWINHFVIWGSLAFYVFFSFFWGGIVWPFLKQQRMYFVFAQMLSSVSTWLAIILLIFISLFPEILLIVLKNVRRRSARRNLSCKRASDSLSTRPSVRPLLLRTFSDESNIL

SEQ ID NO: 188 - protein, 399 aa, Equine
MSQRQPQSPNETLISITNDTESSSSVVPNDNTKKGRTGDNSPGIEALCAIYITYAVIISVGILGNAILIKVFFKTKSMQTVPNIFITSLAFGDLLLLLTCVPVDATHYLAEGWLFGRIGCKVLSFIRLTSVGVSVFTLTILSADRYKAVVKPLERQPSNAILKTCAKAGCVWIVSMIIALPEAIFSNVYTFQDPNRNRTFEACASYPVSERLLQEIHSLLCFLVFYLIPLSIISVYYSLIARTLYKSTLNIPTEEQSHARKQIESRKRIAKTVLVLVALFALCWLPNHLLYLYRSFTYQTYMDPSAVHFLVTIFSRVLAFSNSCVNPFALYWLSKTFQQHFKAQLFCCKAEVPDPAPADATLNSLAVMGRVPGAASTQVSEISVTWFTGCSMEKEDDRV

SEQ ID NO: 189 - protein, 350 aa, Equine
MNLRGLFQDFNPSKFLIYACLLLFSVLLALRLDGIIQWSYWAVFAPIWLWKLMVIVGASVGTGVWARNPQYRAEGETCVEFKAMLIAVGIHLLLLMFEVLVCDRIERGSHFWLLVFMPLFFVSPVSVAACVWGFRHDRSLELEILCSVNILQFIFIALRLDKIIHWPWLVVCVPLWILMSFLCLVVLYYIVWSVLFLRSMDVIAEQRRTHITMALSWMTIVVPLLTFEILLVHKLDGHNAFSCIPIFVPLWLSLITLMATTFGQKGGNHWWFGIRKDFCQFLLEIFPFLREYGNISYDLHHEDNEETEETPVPEPPKIAPMFRKKTRVVITQSPGKYVLPPPKLNIEMPD

SEQ ID NO: 190 - protein, 194 aa, Equine
MAAEDVAATGADPSELEGGGLLHEIFTSPLNLLLLGLCIFLLYKIVRGDQPGSGDSDDDEPPPLPRLKRRDFTPAELRRFDGVQDPRILMAINGKVFDVTKGRKFYGPEGPYGVFAGRDASRGLATFCLDKEALKDEYDDLSDLTPAQQETLSDWDSQFTFKYHHVGKLLKEGEEPTVYSDEEEPKDENARKND

SEQ ID NO: 191 - protein, 703 aa, Equine
PGEEPPTERSRVWGMVRRMLVLVLILSLLLGSSVLLFYIFGSCGPRPCETRVCWDLLARYLASGNTSVAPCTDFFSFACGQAKGISNSFQALAEENKNRLRRILEAPGSWHPGSGEEKAFQFYSFCMDTDAIEAAGAGPLRQIIEELGGWRISGSWTSLDFNRTLRLLMSQYDHFPFFRADLQPHPTPPHLPVIQIYQPEFDLPVKQEQEQKNYAQIVREYLTYLNQLGTLLGGDARKVQEHAAMSISITSQLLQFLRPPEQRRAQGKLFQMVTIDQLQEMAPAIDWLSCLQAIFTSMSLSPSQPLVVHDLEYLKNMSYLVEEQLSKHRDFLQSHMILGLVGSLSPVLDSKFQEAHTLLNQKLRELTERPPLPTHPRWMKCVKETGDYFQPTLAALFVREAFSPSTQSAAMELFTEIKDALITRLRSLPWMDERTQKEAQDKVTQLQVKMGAPEWALEPALARQEYNDIQLGSSYLQSHLSCVRSLRARIIQSFLQPSPHHRWQVLPWEVNAYYSISDHVVVFPAGLFQPPFFHPGYPRAVNFGAAGSIMAHELLHVFYKLLLPGGCPACDTRALQGALLCLEHLYAAFPLPRGVSFNGSRTLLENAADTGGLVIALKAYRKRLLWHRGETVLPNLNLSPQQLFFRSYAQVMCGDPSTQDSQDTHSPPTLRIHGPLSNIPDFARYFRCPRGALMNPSSHCPLW

SEQ ID NO: 192 - protein, 339 aa, Equine
MARPGQRWLGKWLVAMVVLALCRLATPLAKNLEPVSWSSLNPNFLVGKGLVIYPKIGDKLDIICPRAEAGRPYEYYKLYLVRPEQAAACSTVLDPNVLVTCNRPEQEIRFTIKFQEFSPNYMGLEFKKHHDYYITCEFLADLPGLLAEPFGIGQLFSLSLHRKFFPDPKSRIPSPCTSSLAPGQSGGSLGVLGWSPRGQKPFLGCPFRPYTVNQEEKSGSGDPDSFFNSKVALFAAVGAGCVIFLLIIIFLTVLLLKLRKRHRKHTQQRAPALSLSTLASPKGGSGTAGTEPSDIIIPLRTTENNYCPHYEKVSGDYGHPVYIVQEMPPQSPANIYYKV

SEQ ID NO: 193 - protein, 548 aa, Equine
GVFLIPYVLIALIGGIPIFFLEISLGQFMKAGSINVWNICPLFKGLGYASMVIVFYCNTYYIMVLAWGFYYLVKSFTTTLPWATCGHTWNTPDCVEIFRHEDCANASLANLTCDQLADRRSPVIEFWENKVLRLSGGLEVPGALNWEVTLCLLACWVLVYFCVWKGVKSTGKIVYFTATFPYVVLVVLLVRGVLLPGALDGIIYYLKPDWSKLGSPQVWIDAGTQIFFSYAIGLGALTALGSYNRFNNNCYKDAIILALINSGTSFFAGFVVFSILGFMAAEQGVHISKVAESGPGLAFIAYPRAVTLMPVAPLWAALFFFMLLLLGLDSQFVGVEGFITGLLDLLPASYYFRFQREISVALCCALCFVIDLSMVTDGGMYVFQLFDYYSASGTTLLWQAFWECVVVAWVYGADRFMDDVACMIGYRPCPWMKWCWSFFTPLVCMGIFIFNVVYYKPLVYNNTYVYPWWGEAMGWAFALSSMLCVPLHLLGCLLRAKGTVAERWQHLTQPVWGLHHLEYRAQDSDVRGLTTLTPVSESSKVVVVESVM

SEQ ID NO: 194 - protein, 439 aa, Equine
MKRGVRVPVRGETTTALYLSSTYRSAGDGMWQALTLLFSLLPCALVQLTLLFVHRDFSRDRPLVLLLHLLQLGPLFRCFEVFCIYCQSNHVEEPYVSIIKKRQMPRNGLSEEIEREVGQAEGKLFTHRSAFSRASVIQAFLGSAPQLTLQLYISTLQRKVTITRCFFMVLSLLSIVYGALRCNILAIKIKYDEYLVKVKPLAYVCIFLWRSFEIATRVVVLVLFTSVLKAWVVMIILINFLSFFFYPWILFWCSGSPFPENIEKALSRVGTTIVLCFLTFLYAGINMFCWSAVQLKINNPDLISKSQNWYQLLVYYMLRFVENAFLLLMWYLYKTDIYMYVCAPLLILQLLIGYCTAILFMLVFYQFFHPCKKLFSTSVSEGLQEWLRCVCCDCRRQKSCESVGKADLRSPADIDETPSSSKISSMPSEILNPNEFCSI

SEQ ID NO: 195 - protein, 220 aa, Equine
MSILLPNMAEFDTISELEEEEEEAATSSSSPSSSSVSGPDDDDEEDEEEEEEEEEEEEEEEEEETPPPPRVVSEEHLRRYAPDPVLVRGAGHITVFGLSNKFDTEFPSVLTGKVAPEEFKTSIGRVNACLKKALPVNVKWLLCGCLCCCCTLGCSLWPVVCLNKRTRRSIQKLLEWENNRLYHKLALHWKLTKRKCETSNMMEYVILIEFLPKYPIFRPD

SEQ ID NO: 196 - protein, 1501 aa, Equine
MDPSVDVNSVTISVEGMTCSSCVWTIEQQIGKLSGVHHIKVSLEEKCATIIYDPKLQTPKTLQEAIDDMGFDAILNHPNPLPVLTDTVFLTVTASLSPPWDHIQSTLLKTKGVTDIKISPQQRTAVVTIIPSVVTANQIIELVPDLSLDIGTLEKKSGTCEDYSMAQAGEVMVKMKVEGMTCHSCTSTIEGKIGKLQGVQRIKVSLDNQEATIVYQPHLITVEEIKKQIEAAGFPAFIKKQPKFLKLGAIDIERLKNTPVKSSERPQQRSPSCTNDSAVTFIVDGMHCKSCVSNIESALSTLQYVSSVVVSLENRSAIVKYNASLVTPETLRKAIEAISPGQYRVSFPSEVESTSNSPSGSSLHKIPLNIVSQPLTQETVINIDGMTCNSCVQSIEGVISKKAGVKSIRVSLANGNGTVEYDPLLTSPETLRKAIEDMGFDATLSDTNEPLVVIAQPSSEVPLLTSTNEFCPKTMTPTHDKEEAKTSSKCYIQVTGMTCASCVANIERNLRREEGIYSVLVALMAGKAEVRYNPAVIQPPIIAEFIRELGFGATVIENADGGDGILELVVRGMTCASCVHKIESTLTKHRGIFYCSVALATNKAHIKYDPEIIGPRDIIHTIESLGFKASLVKKDRSASHLDHKREIRQWRRSFLVSLFFCIPVMGLMIYMMVMDHHLETLHHNQNISQEEMIHIHSSMFLERQILPGLSIMNLLSFLLCVPPKEFFGGWHFYIQAYKALKHKTANMDVLIVLATTIAFAYSLVILLVAMYERAKVNPITFFDTPPMLFVFIALGRWLEHIAKGKTSEALAKLISLQATEATIVTLDSDNILLSEEQVDVELVQRGDIIKVVPGGKFPVDGRVIEGHSMVDESLITGEAMPVAKKPGSTVIAGSINQNGSLLIRATHVGGDTTLSQIVKLVEEAQTSKAPIQQFADKLSGYFVPFIVIVSIATLLVWIIIGFLNFEIVEAYFPGYNRSISRTETIVRFAFQASITVLCIACPCSLGLATPTAVMVGTGVGAQNGILIKGGEPLEMAHKVKVVVFDKTGTITHGTPVVNQVKVLVESNRMSRNKILAIVGTAESNSEHPLGAAITKYCKKELNTETLGTCTDFQVVPGCGISCKVTNIEGFLHKNNWKIEENNIKNASLVQIDASNEQPSTSSSIIIDAQLSNSLNSQQYKVLIGNREWMIRNGLVINNDVDDSMNEHERKGRTAVLVAVDDELCGLIAIADTVKPEAELAVHTLKSMGLEVVLMTGDNSKTARSIASQVGITKVFAEVLPSHKVAKVKQLQEEGKQVAMVGDGINDSPALAMANVGIAIGTGTDVAIEAADVVLIRNDLLDVVASIDLSRKTVKRIRINFVFALIYNLVGIPIAAGVFMPIGLVLQPWMGSAAMAASSVSVVLSSLFLKLYRKPTYENYELHARSQMGQKSPSEISVHVGIDDTSRNSPKLGLLDRIVNYSRASINSLLSDKRSLNSIGTSEPDKHSLLVGDCREDDDTAL

SEQ ID NO: 197 - protein, 382 aa, Equine
MVFAFWKVFLILNCLAGQVTAVQVTIPDSFVNVTVGSDVTLICTYTTTVASRDKLSIQWSFFHKKELQPVSIYYSEGGQAAAIGQFKGRIVGSNEPGNASITISHMQPADSGIYICDVNNPPDFVGTNQGILNVSVLVKPSKPFCSIQGIPETGHPISLSCLSVLGTPSPVYYWYRLEGRDIVPVKESFNPATGILVIGNLTNFEQGYYQCTAINILGNSSCEIDLTSSHPEVGIIVGALVGTLVGAAIITSIVCFARSKAKAKGKGKERKRNSKTNPELEPMRMINQSTECETMPNEDAVQLEATLPVSTHETDPDTILGLDHEPIPEPEPVPEPVPEPTAGPELVPVPEIEIHLEPEPEPEPETEPEPGIVVEPFCDEEK

SEQ ID NO: 198 - protein, 351 aa, Equine
MAVLVVLLSLLVAGVLGNEFSILKSPGSVVFRDGNWPIPGERIPDVAALSMGFSVKEDLSWPGLAVGNLFHRPRATVMVMVKGVDKLALPPGSVISYPLENAVPFSLDSVANSIHSLFSEETPVVLQLAPSEERVYMVGKANSVFEDLSVTLRQLRNRLFQENSILNSLPLNSLSRNNEVDLLFLSELQVLHDISSLLSRHKHLAKDHSPDLYSLELAGLDEIGKHYGEDSEQFRDASKILVDALQKFADDMYNLYGGNAVVELVTIKSFDTSVVRKTRTILEAEQAKSPSSPYNLAYKYNLEYPVVFNMVLWIMIALALAVIITSYNIWNMDPGYDSIIYRMTNQKIRMD

SEQ ID NO: 199 - protein, 1250 aa, Equine
MGDMANSSIEFHPKPQQQREAPHAGGFGCTLAELRSLMELRGAEALQKVQEAYGDVSGLCRRLKTSPTEGLADNASDLEKRRQIYGQNFIPPKQPKTFLQLVWEALQDVTLIILEVAAIVSLGLSFYAPPGEESEACGNVSAGAEDEGEAEAGWIEGAAILLSVVCVVLVTAFNDWSKEKQFRGLQSRIEQEQKFTVIRNGQLLQVPVAALVVGDIAQVKYGDLLPADGVLIQGNDLKIDESSLTGESDHVRKSADKDPMLLSGTHVMEGSGRMVVTAVGVNSQTGIIFTLLGAGGEEEEKKDKKGKGKQCKQQDGAMESSQTKAKKQDGAVAMEMQPLKSAEGGEMEEREKKKATVPKKEKSVLQGKLTKLAVQIGKAGLVMSAITVIILVLYFVIETFVVDGRVWLAECTPVYVQYFVKFFIIGVTVLVVAVPEGLPLAVTISLAYSVKKMMRDNNLVRHLDACETMGNATAICSDKTGTLTTNRMTVVQSYLGDTHYKEIPAPSALTPKILDLLVHAISINSAYTTKILPPEKEGALPRQVGNKTECALLGFVLDLKRDFQPVREQIPEDKLYKVYTFNSVRKSMSTVIRTPDGGFRLFSKGASEILLKKCTNILNSNGELRSFRPRDRDDMVKKIIEPMACDGLRTICIAYRDFSAAQEPDWDNENEVVGDLTCIAVVGIEDPVRPEVPEAIRKCQRAGITVRMVTGDNINTARAIAAKCGIIQPGEDFLCLEGKEFNRRIRNEKGEIEQERLDKVWPKLRVLARSSPTDKHTLVKGIIDSTTGEQRQVVAVTGDGTNDGPALKKADVGFAMGIAGTDVAKEASDIILTDDNFTSIVKAVMWGRNVYDSISKFLQFQLTVNVVAVIVAFTGACITQDSPLKAVQMLWVNLIMDTFASLALATEPPTESLLLRKPYGRDKPLISRTMMKNILGHAVYQLTIIFTLLFVGELFFDIDSGRNAPLHSPPSEHYTIIFNTFVMMQLFNEVNARKIHGERNVFHGIFSNPIFCAIVLGTFAIQIVIVQFGGKPFSCSPLSTEQWLWCLFVGVGELVWGQVIATIPTSQLKCLKEAGHGPGKDEMADEELAEGEEEIDHAERELRRGQILWFRGLNRIQTQMEVVSTFKRSGSFQGAVRRRSSVLSQLHDIRVVKAFRSSLYEGLEKPESKTSIHNFMATPEFLINDYTHNIPLIDDTDVDENEDRLRAPPPPSPNQNNNAIDSGIYLTTHGTKSATSSVPGSPLHSVETSL

SEQ ID NO: 200 - protein, 369 aa, Equine
MVLEVSEHQVFQDSELAFLLENCSSSYDYLGENESDTCCASPPCPQDFSLNFDRAFLPALYGLLFVLGLLGNGAVAAVLLSQRAALSSTDTFLLHLAVADALLVLTLPLWAVDAAVQWVFGSGLCKVAGALFNINFYAGALLLACISFDRYLSIVHATQLYRRGPPTRVALTCVVVWGLCLLFALPDFIFLSAHRDERLNATHCQYNFPQVGRTALRVLQLVAGFLLPLLVMAYCYARILAVLLVSRGQRRLRAMRLVVVVVVAFALCWTPYYLVMLVDTLMDLGALARNCGRESHVDVAKSVTSGLGYMHCCLNPLLYAFVGVKFRERMWMLLMRLGCPDQKGHQRQPPSCRRDSSWSETTEASYSGL

SEQ ID NO: 201 - protein, 732 aa, Human
MEGGDQSEEEPRERSQAGGMGTLWSQESTPEERLPVEGSRPWAVARRVLTAILILGLLLCFSVLLFYNFQNCGPRPCETSVCLDLRDHYLASGNTSVAPCTDFFSFACGRAKETNNSFQELATKNKNRLRRILEVQNSWHPGSGEEKAFQFYNSCMDTLAIEAAGTGPLRQVIEELGGWRISGKWTSLNFNRTLRLLMSQYGHFPFFRAYLGPHPASPHTPVIQIDQPEFDVPLKQDQEQKIYAQIFREYLTYLNQLGTLLGGDPSKVQEHSSLSISITSRLFQFLRPLEQRRAQGKLFQMVTIDQLKEMAPAIDWLSCLQATFTPMSLSPSQSLVVHDVEYLKNMSQLVEEMLLKQRDFLQSHMILGLVVTLSPALDSQFQEARRKLSQKLRELTEQPPMPARPRWMKCVEETGTFFEPTLAALFVREAFGPSTRSAAMKLFTAIRDALITRLRNLPWMNEETQNMAQDKVAQLQVEMGASEWALKPELARQEYNDIQLGSSFLQSVLSCVRSLRARIVQSFLQPHPQHRWKVSPWDVNAYYSVSDHVVVFPAGLLQPPFFHPGYPRAVNFGAAGSIMAHELLHIFYQLLLPGGCLACDNHALQEAHLCLKRHYAAFPLPSRTSFNDSLTFLENAADVGGLAIALQAYSKRLLRHHGETVLPSLDLSPQQIFFRSYAQVMCRKPSPQDSHDTHSPPHLRVHGPLSSTPAFARYFRCARGALLNPSSRCQLW

SEQ ID NO: 202 - DNA, 2545 bp, Human
gggaggagaagcctgggtgccccccactgataagcaggctccacccagaggccagtcctgtgtgtctggggacaaggcgaaagagcagcagaagtgccccttctccaggatcaaggaactggggcggggggtgtttcctggaccccagtcctccgaatcagctcctagagtggaaccaggaaggattctggagccacagaagatagacagatggaaggtggggaccaaagtgaggaagagccgagggaacgcagccaggcaggtggaatgggaactctctggagccaagagagcactccagaagagaggctgcccgtggaagggagcaggccatgggcagtggccaggcgggtgctgacagctatcctgattttgggcctgctcctttgtttttctgtgcttttgttctacaacttccagaactgtggccctcgcccctgtgagacatctgtgtgtttggatctccgggatcattacctggcctctgggaacacaagtgtggccccctgcaccgacttcttcagctttgcctgtggaagggccaaagagaccaataattcttttcaggagcttgccacaaagaacaaaaaccgacttcggagaatactggaggtccagaattcctggcacccaggctctggggaggagaaagccttccagttctacaactcctgcatggatacacttgccattgaagctgcagggactggtcccctcagacaagttattgaggagcttggaggctggcgcatctctggtaaatggacttccttaaactttaaccgaacgctgagacttctgatgagtcagtatggccatttccctttcttcagagcctacctaggacctcatcctgcctctccacacacaccagtcatccagatagaccagccagagtttgatgttcccctcaagcaagatcaagaacagaagatctatgcccagatctttcgggaatacctgacttacctgaatcagctgggaaccttgctgggaggagacccaagcaaggtgcaagaacactcttccttgtcaatctccatcacttcacggctgttccagtttctgaggcccctggagcagcggcgggcacagggcaagctcttccagatggtcactatcgaccagctcaaggaaatggcccccgccatcgactggttgtcctgcttgcaagcgacattcacaccgatgtccctgagcccttctcagtccctcgtggtccatgacgtggaatatttgaaaaacatgtcacaactggtggaggagatgctgctaaagcagagggactttctgcagagccacatgatcttagggctggtggtgaccctttctccagccctggacagtcaattccaggaggcacgcagaaagctcagccagaaactgcgggaactgacagagcaaccacccatgcctgcccgcccacgatggatgaagtgcgtggaggagacaggcacgttcttcgagcccacgctggcggctttgtttgttcgtgaggcctttggcccgagcacccgaagtgctgccatgaaattattcactgcgatccgggatgccctcatcactcgcctcagaaaccttccctggatgaatgaggagacccagaacatggcccaggacaaggttgctcaactgcaggtggagatgggggcttcagaatgggccctgaagccagagctggcccgacaagaatacaacgatatacagcttggatcgagcttcctgcagtctgtcctgagctgtgtccggtccctccgagctagaattgtccagagcttcttgcagcctcacccccaacacaggtggaaggtgtccccttgggacgtcaatgcttactattcggtatctgaccatgtggtagtctttccagctggactcctccaacccccattcttccaccctggctatcccagagccgtgaactttggcgctgctggcagcatcatggcccacgagctgttgcacatcttctaccagctcttactgcctgggggctgcctcgcctgtgacaaccatgccctccaggaagctcacctgtgcctgaagcgccattatgctgcctttccattacctagcagaacctccttcaatgactccctcacattcttagagaatgctgcagacgttggggggctagccatcgcgctgcaggcatacagcaagaggctgttacggcaccatggggagactgtcctgcccagcctggacctcagcccccagcagatcttctttcgaagctatgcccaggtgatgtgtaggaagcccagcccccaggactctcacgacactcacagccctccacacctccgagtccacgggcccctcagcagcaccccagcctttgccaggtatttccgctgtgcacgtggtgctctcttgaacccctccagccgctgccagctctggtaacttggttaccaaagatgccacagcacagaaatatcgaccaacacctccctggtcacatccatggaatcagagcaagatttcctttctgcttctgttccaaaaataaaagctggcacttggcttccgcttgtctctt
